(19) United States
(12) Patent Application Publication
(10) Pub. No.: US 2025/0326839 A1
(43) Pub. Date: Oct. 23, 2025

(54) TREATMENT OF DISEASES RELATED TO COLONY-STIMULATING FACTOR 1 RECEPTOR DYSFUNCTION USING TREM2 AGONISTS

(71) Applicant: Vigil Neuroscience, Inc., Watertown, MA (US)

(72) Inventors: Matthew BRENNAN, Andover, MA (US); Judith DUNN, Boston, MA (US); Richard FISHER, Cambridge, MA (US); Berkley A. LYNCH, Cambridge, MA (US); Steven ROBINETTE, Fremont, NH (US)

(21) Appl. No.: 18/750,901

(22) Filed: Jun. 21, 2024

Related U.S. Application Data
(63) Continuation of application No. 17/444,511, filed on Aug. 5, 2021, now abandoned.
(60) Provisional application No. 63/061,315, filed on Aug. 5, 2020.
(60) Provisional application No. 63/129,852, filed on Dec. 23, 2020.

(51) Int. Cl. C07K 16/28; A61K 38/17; A61K 39/00; A61P 25/28

(52) U.S. Cl. CPC C07K 16/2803; A61K 38/1709; A61P 25/28; A61K 39/00; C07K 2317/56; C07K 2317/565

(57) ABSTRACT

The present invention provides a method of treating a disease or disorder caused by and/or associated with CSF1R dysfunction in a human patient, the method comprising administering to the patient in need thereof an effective amount of a compound that increases the activity of triggering receptor expressed on myeloid cells 2 (TREM2). In some embodiments, compound that increases the activity of TREM2 is an agonist of TREM2. In some embodiments, the agonist of TREM2 is a small molecule agonist of TREM2 or an antibody agonist of TREM2.

### CROSS REFERENCE TO RELATED APPLICATION

[0001] This application claims the benefit of United States Provisional Application No. 63/061,315, filed Aug. 5, 2020, and 63/129,852, filed Dec. 23, 2020, the entirety of which are incorporated herein by reference.

### TECHNICAL FIELD OF THE INVENTION

[0002] The present invention relates to compounds and methods of use thereof for treating diseases and disorders caused by colony-stimulating factor 1 receptor (CSF1R) dysfunction.

### BACKGROUND OF THE INVENTION

[0003] Microglia are brain-resident macrophages with many homeostatic and injury responsive roles, including trophic and phagocytic functions. Mutations in a key microglia regulator, colony-stimulating factor 1 receptor (CSF1R), lead to microglia dysfunction and apoptosis and result in neurological and skeletal diseases and disorders. Adult-onset leukoencephalopathy with axonal spheroids and pigmented glia (ALSP), previously recognized as hereditary diffuse leukoencephalopathy with axonal spheroids (HDLS) or pigmentary orthochromatic leukodystrophy (POLD), is one such neurological condition characterized by cerebral white matter degeneration with demyelination and axonal spheroids leading to progressive cognitive and motor dysfunction which ultimately results in death. ALSP has been found to be caused by a heterozygous loss-of-function mutations in the CSF1R which occur predominantly in the kinase domain.

[0004] To date, there are no known treatments for diseases and disorders caused by CSF1R dysfunction, including ALSP, and patients are usually treated by managing the symptoms of the disease. Therefore, there remains a need in the art for methods of treating diseases and disorders caused by CSF1R dysfunction.

### SUMMARY OF THE INVENTION

[0005] In one aspect, the present invention provides a method of treating a disease or disorder caused by and/or associated with a dysfunction in CSF1R in a human patient, the method comprising administering to the patient an effective amount of a compound that increases the activity of triggering receptor expressed on myeloid cells 2 (TREM2). In some embodiments, the compound that increases the activity of TREM2 is an agonist of TREM2. In some embodiments, the agonist of TREM2 is a small molecule agonist of TREM2 or an antibody agonist of TREM2. In some embodiments, the disease or disorder caused by and/or associated with a dysfunction in CSF1R is ALSP.

### BRIEF DESCRIPTION OF THE DRAWINGS

[0006] The drawings show embodiments of the disclosed subject matter for the purpose of illustrating the invention. However, it should be understood that the present application is not limited to the precised arrangements and embodiments shown in the drawings.

[0007] FIGS. 1 and 2 are graphs showing a comparison of cellular confluence of human derived macrophages under M-CSF withdrawal conditions, after exposure to TREM2 agonist antibody Ab-3 or an isotype matched IgG control.

[0008] FIGS. 3 and 4 are graphs showing a comparison of apoptosis levels in human derived macrophages under M-CSF withdrawal conditions, as measured by Caspase 3/7 staining, after exposure to TREM2 agonist antibody Ab-3 or an isotype matched IgG control.

[0009] FIG. 5 is a graph showing a comparison of cellular confluence of human derived macrophages exposed to CSF1R small molecule inhibitor PLX5622, along with either TREM2 agonist antibody Ab-3 or an isotype matched IgG control.

[0010] FIG. 6 is a graph showing a comparison of cellular morphology of human derived macrophages exposed to CSF1R small molecule inhibitor PLX5622, along with either TREM2 agonist antibody Ab-3 or an isotype matched IgG control.

[0011] FIG. 7 is a graph showing a comparison of cell count for human derived macrophages exposed to CSF1R small molecule inhibitor PLX5622, along with either TREM2 agonist antibody Ab-3 or an isotype matched IgG control, showing that the changes in cellular confluence and cellular morphology observed in FIGS. 5 and 6 are not due to changes in overall cell count.

### DETAILED DESCRIPTION OF CERTAIN EMBODIMENTS

### TREM2, DAP12, CSF1-R and ALSP

[0012] TREM2 is a member of the Ig superfamily of receptors that is expressed on cells of myeloid lineage, including macrophages, dendritic cells, and microglia (Schmid et al., Journal of Neurochemistry, Vol. 83: 1309-1320, 2002; Colonna, Nature Reviews Immunology, Vol. 3: 445-453, 2003; Kiialainen et al., Neurobiology of Disease, 2005, 18: 314-322). TREM2 is an immune receptor that binds many endogenous substrates, including ApoE, LPS, exposed phospholipids, phosphatidylserine and amyloid beta and signals through a short intracellular domain that complexes with the adaptor protein DAP12, the cytoplasmic domain of which comprises an ITAM motif (Bouchon et al., The Journal of Experimental Medicine, 2001, 194: 1111-1122). Upon activation of TREM2, tyrosine residues within the ITAM motif in DAP12 are phosphorylated by the Src family of kinases, providing docking sites for the tyrosine kinase ζ-chain-associated protein 70 (ZAP70) and spleen tyrosine kinase (Syk) via their SH2 domains (Colonna, Nature Reviews Immunology, 2003, 3:445-453; Ulrich and Holtzman, ACS Chem. Neurosci., 2016, 7:420-427). The ZAP70 and Syk kinases induce activation of several downstream signaling cascades, including phosphatidylinositol 3-kinase (PI3K), protein kinase C (PKC), extracellular regulated kinase (ERK), and elevation of intracellular calcium (Colonna, Nature Reviews Immunology, 2003, 3:445-453; Ulrich and Holtzman, ACS Chem. Neurosci., 2016, 7:420-427). The wild-type human TREM2 amino acid sequence is provided as SEQ ID NO: 1.

[0013] Human DAP12 is encoded by the TYROBP gene located on chromosome 19q13.1. The human protein is 113 amino acids in length and comprises a leader sequence (amino acids 1-27 of SEQ ID NO: 3), a short extracellular domain (amino acids 28-41 of SEQ ID NO: 3), a transmembrane domain (amino acids 42-65 of SEQ ID NO: 3) and a cytoplasmic domain (amino acids 66-113 of SEQ ID NO: 3) (Paradowska-Gorycka et al., Human Immunology, 2013, 74: 730-737). DAP12 forms a homodimer through two cysteine residues in the short extracellular domain. The wild-type human DAP12 amino acid sequence (NCBI Reference Sequence: NP_003323.1) is provided as SEQ ID NO: 3.

[0014] TREM2 has been implicated in several myeloid cell processes, including phagocytosis, proliferation, survival, and regulation of inflammatory cytokine production (Ulrich and Holtzman, ACS Chem. Neurosci., 2016, 7: 420-427). In the last few years, TREM2 has been linked to several diseases. For instance, mutations in both TREM2 and DAP12 have been linked to the autosomal recessive disorder Nasu-Hakola Disease, which is characterized by bone cysts, muscle wasting and demyelination phenotypes (Guerreiro et al., New England Journal of Medicine, 2013, 368: 117-127). More recently, variants in the TREM2 gene have been linked to increased risk for Alzheimer's disease (AD) and other forms of dementia including frontotemporal dementia and amyotrophic lateral sclerosis (Jonsson et al., New England Journal of Medicine, 2013, 368:107-116; Guerreiro et al., JAMA Neurology, 2013, 70:78-84; Jay et al., Journal of Experimental Medicine, 2015, 212: 287-295; Cady et al, JAMA Neurol. 2014 April; 71(4):449-53). In particular, the R47H variant has been identified in genome-wide studies as being associated with increased risk for late-onset AD with an overall adjusted odds ratio (for populations of all ages) of 2.3, second only to the strong genetic association of ApoE to Alzheimer's. The R47H mutation resides on the extracellular Ig V-set domain of the TREM2 protein and has been shown to impact lipid binding and uptake of apoptotic cells and Abeta (Wang et al., Cell, 2015, 160: 1061-1071; Yeh et al., Neuron, 2016, 91: 328-340), suggestive of a loss-of-function linked to disease. Further, postmortem comparison of AD patients' brains with and without the R47H mutation are supportive of a novel loss-of-microglial barrier function for the carriers of the mutation, with the R47H carrier microglia putatively demonstrating a reduced ability to compact plaques and limit their spread (Yuan et al., Neuron, 2016, 90: 724-739). Impairment in microgliosis has been reported in animal models of prion disease, multiple sclerosis, and stroke, suggesting that TREM2 may play an important role in supporting microgliosis in response to pathology or damage in the central nervous system (Ulrich and Holtzman, ACS Chem. Neurosci., 2016, 7: 420-427).

[0015] CSF1R is a cell-surface receptor primarily for the cytokine colony stimulating factor 1 (CSF-1), also known until recently as macrophage colony-stimulating factor (M-CSF), which regulates the survival, proliferation, differentiation and function of mononuclear phagocytic cells, including microglia of the central nervous system. CSF1R is composed of a highly glycosylated extracellular ligand-binding domain, a trans-membrane domain and an intracellular tyrosine-kinase domain. Binding of CSF-1 to CSF1R results in the formation of receptor homodimers and subsequent auto-phosphorylation of several tyrosine residues in the cytoplasmic domain, notably Syk. In the brain, CSF1R is predominantly expressed in microglial cells. It has been found that microglia in CSF1R+/− patients are depleted and show increased apoptosis (Oosterhof et al., 2018).

[0016] The present invention relates to the unexpected discovery that administration of a TREM2 agonist can rescue the loss of microglia in cells having mutations in CSF1R. It has been previously shown that TREM2 agonist antibody 4D9 increases ATP luminescence (a measure of cell number and activity) in a dose dependent manner when the levels of M-CSF in media are reduced to 5 ng/mL (Schlepckow et al, EMBO Mol Med., 2020) and that TREM2 agonist AL002c increases ATP luminescence when M-CSF is completely removed from the media (Wang et al, J. Exp. Med.; 2020, 217(9): e20200785). This finding suggests that TREM2 agonism can compensate for deficiency in CSF1R signaling caused by a decrease in the concentration of its ligand. In a 5×FAD murine Alzheimer's disease model of amyloid pathology, doses of a CSF1R inhibitor that almost completely eliminate microglia in the brains of wild-type animals show surviving microglia clustered around the amyloid plaques (Spangenberg et al, Nature Communications 2019). Plaque amyloid has been demonstrated in the past to be a ligand for TREM2, and it has been shown that microglial engagement with amyloid is dependent on TREM2 (Condello et al, Nat Comm., 2015). The present invention relates to the unexpected discovery that it is activation of TREM2 that rescued the microglia in the presence of the CSF1R inhibitor, and that this effect is also observed in patients suffering from loss of microglia due to CSF1R mutation. This discovery has not been previously taught or suggested in the available art.

[0017] To date, no prior study has shown that TREM2 agonism can rescue the loss of microglia in cells where mutations in the CSF1R kinase domain reduce CSF1R activity, rather than the presence of a CSF1R inhibitor or a deficiency in CSF1R ligand. Furthermore, no prior study has taught or suggested that reversal of the loss of microglia due to a CSF1R mutation through TREM2 agonism can be used to treat a disease or disorder caused by and/or associated with a CSF1R mutation.

[0018] Adult-onset leukoencephalopathy with axonal spheroids and pigmented glia (ALSP), previously recognized as hereditary diffuse leukoencephalopathy with axonal spheroids (HDLS) or pigmentary orthochromatic leukodystrophy (POLD), is an autosomal-dominant central nervous system disease that manifests in the form of variable behavioral, cognitive and motor function changes in patients suffering from the disease. ALSP is characterized by patchy cerebral white matter abnormalities visible by magnetic resonance imaging. However, the clinical symptoms and MRI changes are not specific to ALSP and are common for other neurological conditions, including Nasu-Hakola disease (NHD) and AD, making diagnosis and treatment of ALSP very difficult.

[0019] Recent studies have discovered that ALSP is a Mendelian disorder in which patients carry a heterozygous loss of function mutation in the kinase domain of CSF1R, suggesting a reduced level of signaling on the macrophage colony-stimulating factor (M-CSF)/CSF1R axis (Rademakers et al, Nat Genet 2012; Konno et al, Neurology 2018). In one aspect, the present invention relates to the surprising discovery that activation of the TREM2 pathway can rescue the loss of microglia in CSF1R+/− ALSP patients, preventing microglia apoptosis, thereby treating the ALSP condition.

[0020] The present invention also relates to the surprising discovery that neurofilament light chain and neurofilament heavy chain proteins can serve as a therapeutic biomarker to determine treatment efficacy in patients suffering from a disease or disorder caused by and/or associated with a CSF1R dysfunction, such as ALSP. Neurofilament light chain (NfL) is highly elevated in the plasma and serum of patients with ALSP, particularly those with symptoms but also in carriers of these mutations that do not yet show symptoms (Hayer et al, American Academy of Neurology 2018). ALSP is characterized by severe and rapid myelin breakdown followed by neurodegeneration. Mice exposed to cuprizone, a model of acute demyelination, show elevations in plasma NfL (Taylor Meadows et al, European Charcot Foundation 25th Annual Meeting; November 30-Dec. 2, 2017; Baveno, Italy). Additionally, TREM2 knockout mice exposed to cuprizone show increased neurotoxicity and further increases in plasma and CSF NfL (Nugent et al, Neuron; 2020, 105(5): 837-854; O'Loughlin et al, Poster #694 ADPD Symposium, Lisbon Portugal, April 2019.) It has also been demonstrated that microglia are indeed depleted when a CSF1R inhibitor is dosed in the cuprizone model, and that this leads to a quantitative increase in the myelin debris and axonal pathology observed in these mice (Beckmann et al. Acta Neuropathologica Communications (2018)). Patients with ALSP have quantitatively fewer microglia than healthy individuals in multiple regions of the brain (Oosterhof et al., 2018, Cell Reports 24, 1203-1217). Beckmann, et al. did not measure the plasma/serum products of neurofilament degradation, but showed reduced staining for neurofilament centrally. Central neurofilament stain was reduced in mice dosed with cuprizone and further reduced with mice dosed with cuprizone on the background of microglia depleted by concomitant administration of a CSF1R inhibitor. The present invention relates to the unexpected discovery that neurofilament is broken down in the neurons of animals suffering from a disease or disorder caused by and/or associated with a CSF1R dysfunction, such as ALSP, resulting in an increase in neurofilament breakdown products in the plasma, serum and cerebral spinal fluid (CSF), and that efficacy of treatment of the diseases or disorder with a TREM2 agonist can be determined by measuring central levels of neurofilament and central nervous system (CNS), plasma and serum levels of its degradation products, namely neurofilament light chain and neurofilament heavy chain proteins. In one aspect, the present invention provides methods for selecting ALSP patients that are likely to experience progression of their neurodegenerative or other disease phenotypes based on neurofilament light chain or neurofilament heavy chain levels, thereby informing the timing of treatment with a TREM2 agonist.

[0021] The present invention also relates to the surprising discovery that soluble TREM2 (sTREM2) and soluble CSF1R (sCSF1R) can serve as therapeutic biomarkers for determining treatment efficacy in patients suffering from a disease or disorder caused by and/or associated with a CSF1R dysfunction, such as ALSP. It has been shown that TREM2 agonist antibody AL002 causes a dose-dependent decrease in cerebrospinal fluid concentration of sTREM2 and an increase in sCSF1R concentration (Wang et al, J. Exp. Med.; 2020, 217(9): e20200785). In one aspect, the present invention provides methods of selecting patients that are likely to experience progression of their neurodegenerative or other disease phenotypes based on concentrations of sTREM2 and sCSF1R, thereby informing the timing of treatment with a TREM2 agonist.

### Definitions

[0022] Unless defined otherwise, all technical and scientific terms used herein have the same meaning as commonly understood by one of ordinary skill in the art. Accordingly, the following terms are intended to have the following meanings.

[0023] “Agonist” or an “activating” agent, such as a compound or antibody, is an agent that induces (e.g., increases) one or more activities or functions of the target (e.g., TREM2) of the agent after the agent binds the target.

[0024] “Antagonist” or a “blocking” agent, such as a compound or antibody, is an agent that reduces or eliminates (e.g., decreases) binding of the target to one or more ligands after the agent binds the target, and/or that reduces or eliminates (e.g., decreases) one or more activities or functions of the target after the agent binds the target. In some embodiments, antagonist agent, or blocking agent substantially or completely inhibits target binding to one or more of its ligand and/or one or more activities or functions of the target.

[0025] “Antibody” is used in the broadest sense and refers to an immunoglobulin or fragment thereof, and encompasses any such polypeptide comprising an antigen-binding fragment or region of an antibody. The recognized immunoglobulin genes include the kappa, lambda, alpha, gamma, delta, epsilon and mu constant region genes, as well as myriad immunoglobulin variable region genes. Light chains are generally classified as either kappa or lambda. Heavy chains are classified as gamma, mu, alpha, delta, or epsilon, which in turn define the immunoglobulin classes, IgG, IgM, IgA, IgD and IgE, respectively. Immunoglobulin classes may also be further classified into subclasses, including IgG subclasses IgG1, IgG₂, IgG₃, and IgG₄; and IgA subclasses IgA₁ and IgA₂. The term includes, but is not limited to, polyclonal, monoclonal, monospecific, multispecific (e.g., bispecific antibodies), natural, humanized, human, chimeric, synthetic, recombinant, hybrid, mutated, grafted, antibody fragments (e.g., a portion of a full-length antibody, generally the antigen binding or variable region thereof, e.g., Fab, Fab′, F(ab′)2, and Fv fragments), and in vitro generated antibodies so long as they exhibit the desired biological activity. The term also includes single chain antibodies, e.g., single chain Fv (sFv or scFv) antibodies, in which a variable heavy and a variable light chain are joined together (directly or through a peptide linker) to form a continuous polypeptide.

[0026] “Isolated” refers to a change from a natural state, that is, changed and/or removed from its original environment. For example, a polynucleotide or polypeptide (e.g., an antibody) is isolated when it is separated from material with which it is naturally associated in the natural environment. Thus, an “isolated antibody” is one which has been separated and/or recovered from a component of its natural environment.

[0027] “Purified antibody” refers to an antibody preparation in which the antibody is at least 80% or greater, at least 85% or greater, at least 90% or greater, at least 95% or greater by weight as compared to other contaminants (e.g., other proteins) in the preparation, such as by determination using SDS-polyacrylamide gel electrophoresis (PAGE) or capillary electrophoresis-(CE) SDS under reducing or non-reducing conditions.

[0028] “Extracellular domain” and “ectodomain” are used interchangeably when used in reference to a membrane bound protein and refer to the portion of the protein that is exposed on the extracellular side of a lipid membrane of a cell.

[0029] “Binds specifically” in the context of any binding agent, e.g., an antibody, refers to a binding agent that binds specifically to an antigen or epitope, such as with a high affinity, and does not significantly bind other unrelated antigens or epitopes.

[0030] “Functional” refers to a form of a molecule which possesses either the native biological activity of the naturally existing molecule of its type, or any specific desired activity, for example as judged by its ability to bind to ligand molecules. Examples of “functional” polypeptides include an antibody binding specifically to an antigen through its antigen-binding region.

[0031] “Antigen” refers to a substance, such as, without limitation, a particular peptide, protein, nucleic acid, or carbohydrate which can bind to a specific antibody.

[0032] “Epitope” or “antigenic determinant” refers to that portion of an antigen capable of being recognized and specifically bound by a particular antibody. When the antigen is a polypeptide, epitopes can be formed from contiguous amino acids and/or noncontiguous amino acids juxtaposed by tertiary folding of a protein. Linear epitope is an epitope formed from contiguous amino acids on the linear sequence of amino acids. A linear epitope may be retained upon protein denaturing. Conformational or structural epitope is an epitope composed of amino acid residues that are not contiguous and thus comprised of separated parts of the linear sequence of amino acids that are brought into proximity to one another by folding of the molecule, such as through secondary, tertiary, and/or quaternary structures. A conformational or structural epitope may be lost upon protein denaturation. In some embodiments, an epitope can comprise at least 3, and more usually, at least 5 or 8-10 amino acids in a unique spatial conformation. Thus, an epitope as used herein encompasses a defined epitope in which an antibody binds only portions of the defined epitope. There are many methods known in the art for mapping and characterizing the location of epitopes on proteins, including solving the crystal structure of an antibody-antigen complex, competition assays, gene fragment expression assays, mutation assays, and synthetic peptide-based assays, as described, for example, in Using Antibodies: A Laboratory Manual, Chapter 11, Harlow and Lane, eds., Cold Spring Harbor Laboratory Press, Cold Spring Harbor, New York (1999).

[0033] “Protein,” “polypeptide,” or “peptide” denotes a polymer of at least two amino acids covalently linked by an amide bond, regardless of length or post-translational modification (e.g., glycosylation, phosphorylation, lipidation, myristoylation, ubiquitination, etc.). Included within this definition are D- and L-amino acids, and mixtures of D- and L-amino acids. Unless specified otherwise, the amino acid sequences of a protein, polypeptide, or peptide are displayed herein in the conventional N-terminal to C-terminal orientation.

[0034] “Polynucleotide” and “nucleic acid” are used interchangeably herein and refer to two or more nucleosides that are covalently linked together. The polynucleotide may be wholly comprised of ribonucleosides (i.e., an RNA), wholly comprised of 2′ deoxyribonucleotides (i.e., a DNA) or mixtures of ribo- and 2′ deoxyribonucleosides. The nucleosides will typically be linked together by sugar-phosphate linkages (sugar-phosphate backbone), but the polynucleotides may include one or more non-standard linkages. Non-limiting example of such non-standard linkages include phosphoramidates, phosphorothioates, and amides (see, e.g., Eckstein, F., Oligonucleotides and Analogues: A Practical Approach, Oxford University Press (1992)).

[0035] “Operably linked” or “operably associated” refers to a situation in which two or more polynucleotide sequences are positioned to permit their ordinary functionality. For example, a promoter is operably linked to a coding sequence if it is capable of controlling the expression of the sequence. Other control sequences, such as enhancers, ribosome binding or entry sites, termination signals, polyadenylation sequences, and signal sequences are also operably linked to permit their proper function in transcription or translation.

[0036] “Amino acid position” and “amino acid residue” are used interchangeably to refer to the position of an amino acid in a polypeptide chain. In some embodiments, the amino acid residue can be represented as “XN”, where X represents the amino acid and the N represents its position in the polypeptide chain. Where two or more variations, e.g., polymorphisms, occur at the same amino acid position, the variations can be represented with a “/” separating the variations. A substitution of one amino acid residue with another amino acid residue at a specified residue position can be represented by XNY, where X represents the original amino acid, N represents the position in the polypeptide chain, and Y represents the replacement or substitute amino acid. When the terms are used to describe a polypeptide or peptide portion in reference to a larger polypeptide or protein, the first number referenced describes the position where the polypeptide or peptide begins (i.e., amino end) and the second referenced number describes where the polypeptide or peptide ends (i.e., carboxy end).

[0037] “Polyclonal” antibody refers to a composition of different antibody molecules which is capable of binding to or reacting with several different specific antigenic determinants on the same or on different antigens. A polyclonal antibody can also be considered to be a “cocktail of monoclonal antibodies.” The polyclonal antibodies may be of any origin, e.g., chimeric, humanized, or fully human.

[0038] “Monoclonal antibody” refers to an antibody obtained from a population of substantially homogeneous antibodies, i.e., the individual antibodies comprising the population are identical except for possible naturally occurring mutations that may be present in minor amounts. Each monoclonal antibody is directed against a single determinant on the antigen. In some embodiments, monoclonal antibodies to be used in accordance with the present disclosure can be made by the hybridoma method described by Kohler et al., 1975, Nature 256:495-7, or by recombinant DNA methods. The monoclonal antibodies can also be isolated, e.g., from phage antibody libraries.

[0039] “Chimeric antibody” refers to an antibody made up of components from at least two different sources. A chimeric antibody can comprise a portion of an antibody derived from a first species fused to another molecule, e.g., a portion of an antibody derived from a second species. In some embodiments, a chimeric antibody comprises a portion of an antibody derived from a non-human animal, e.g., mouse or rat, fused to a portion of an antibody derived from a human. In some embodiments, a chimeric antibody comprises all or a portion of a variable region of an antibody derived from a non-human animal fused to a constant region of an antibody derived from a human.

[0040] “Humanized antibody” refers to an antibody that comprises a donor antibody binding specificity, e.g., the CDR regions of a donor antibody, such as a mouse monoclonal antibody, grafted onto human framework sequences. A “humanized antibody” typically binds to the same epitope as the donor antibody.

[0041] “Fully human antibody” or “human antibody” refers to an antibody that comprises human immunoglobulin protein sequences only. A fully human antibody may contain murine carbohydrate chains if produced in a non-human cell, e.g., a mouse, in a mouse cell, or in a hybridoma derived from a mouse cell.

[0042] “Full-length antibody,” “intact antibody” or “whole antibody” are used interchangeably to refer to an antibody, such as an anti-TREM2 antibody of the present disclosure, in its substantially intact form, as opposed to an antibody fragment. Specifically whole antibodies include those with heavy and light chains including an Fc region. The constant domains may be native sequence constant domains (e.g., human native sequence constant domains) or amino acid sequence variants thereof. In some cases, the intact antibody may have one or more effector functions.

[0043] “Antibody fragment” or “antigen-binding moiety” refers to a portion of a full length antibody, generally the antigen binding or variable domain thereof. Examples of antibody fragments include Fab, Fab′, F(ab′)2, and Fv fragments; diabodies; linear antibodies; single-chain antibodies; and multispecific antibodies formed from antibody fragments that bind two or more different antigens. Several examples of antibody fragments containing increased binding stoichiometries or variable valencies (2, 3 or 4) include triabodies, trivalent antibodies and trimerbodies, tetrabodies, tandAbs®, di-diabodies and (sc(Fv)2)₂ molecules, and all can be used as binding agents to bind with high affinity and avidity to soluble antigens (see, e.g., Cuesta et al., 2010, Trends Biotech. 28:355-62).

[0044] “Single-chain Fv” or “sFv” antibody fragment comprises the VH and VL domains of an antibody, where these domains are present in a single polypeptide chain. Generally, the Fv polypeptide further comprises a polypeptide linker between the VH and VL domains which enables the sFv to form the desired structure for antigen binding. For a review of sFv, see Pluckthun in The Pharmacology of Monoclonal Antibodies, Vol. 113, pp. 269-315, Rosenberg and Moore, eds., Springer-Verlag, New York (1994).

[0045] “Diabodies” refers to small antibody fragments with two antigen-binding sites, which comprise a heavy chain variable domain (VH) connected to a light chain variable domain (VL) in the same polypeptide chain (VH-VL). By using a linker that is short to allow pairing between the two domains on the same chain, the domains are forced to pair with the complementary domains of another chain and create two antigen-binding sites.

[0046] “Antigen binding domain” or “antigen binding portion” refers to the region or part of the antigen binding molecule that specifically binds to and complementary to part or all of an antigen. In some embodiments, an antigen binding domain may only bind to a particular part of the antigen (e.g., an epitope), particularly where the antigen is large. An antigen binding domain may comprise one or more antibody variable regions, particularly an antibody light chain variable region (VL) and an antibody heavy chain variable region (VH), and particularly the complementarity determining regions (CDRs) on each of the VH and VL chains.

[0047] “Variable region” and “variable domain” are used interchangeably to refer to the polypeptide region that confers the binding and specificity characteristics of each particular antibody. The variable region in the heavy chain of an antibody is referred to as “VH” while the variable region in the light chain of an antibody is referred to as “VL”. The major variability in sequence is generally localized in three regions of the variable domain, denoted as “hypervariable regions” or “CDRs” in each of the VL region and VH region, and forms the antigen binding site. The more conserved portions of the variable domains are referred to as the framework region FR.

[0048] “Complementarity-determining region” and “CDR” are used interchangeably to refer to non-contiguous antigen binding regions found within the variable region of the heavy and light chain polypeptides of an antibody molecule. In some embodiments, the CDRs are also described as “hypervariable regions” or “HVR”. Generally, naturally occurring antibodies comprise six CDRs, three in the VH (referred to as: CDR H1 or H1; CDR H2 or H2; and CDR H3 or H3) and three in the VL (referred to as: CDR L1 or L1; CDR L2 or L2; and CDR L3 or L3). The CDR domains have been delineated using various approaches, and it is to be understood that CDRs defined by the different approaches are to be encompassed herein. The “Kabat” approach for defining CDRs uses sequence variability and is the most commonly used (Kabat et al., 1991, “Sequences of Proteins of Immunological Interest, 5^{th} Ed.” NIH 1:688-96). “Chothia” uses the location of structural loops (Chothia and Lesk, 1987, J Mol Biol. 196:901-17). CDRs defined by “AbM” are a compromise between the Kabat and Chothia approach, and can be delineated using Oxford Molecular AbM antibody modeling software (see, Martin et al., 1989, Proc. Natl Acad Sci USA. 86:9268; see also, world wide web www.bioinf-org.uk/abs). The “Contact” CDR delineations are based on analysis of known antibody-antigen crystal structures (see, e.g., MacCallum et al., 1996, J. Mol. Biol. 262, 732-45). The CDRs delineated by these methods typically include overlapping or subsets of amino acid residues when compared to each other.

[0049] It is to be understood that the exact residue numbers which encompass a particular CDR will vary depending on the sequence and size of the CDR, and those skilled in the art can routinely determine which residues comprise a particular CDR given the amino acid sequence of the variable region of an antibody.

[0050] Kabat, supra, also defined a numbering system for variable domain sequences that is applicable to any antibody. The Kabat numbering system is generally used when referring to a residue in the variable domain (approximately residues 1-107 of the light chain and residues 1-113 of the heavy chain) (e.g., Kabat et al., Sequences of Immunological Interest. 5th Ed. Public Health Service, National Institutes of Health, Bethesda, Md. (1991)). The “EU or, Kabat numbering system” or “EU index” is generally used when referring to a residue in an immunoglobulin heavy chain constant region (e.g., the EU index reported in Kabat et al., supra). The “EU index as in Kabat” refers to the residue numbering of the human IgG1 EU antibody. References to residue numbers in the variable domain of antibodies means residue numbering by the Kabat numbering system. References to residue numbers in the constant domain of antibodies means residue numbering by the EU or, Kabat numbering system {e.g., see United States Patent Publication No. 2010-280227). One of skill in the art can assign this system of “Kabat numbering” to any variable domain sequence. Accordingly, unless otherwise specified, references to the number of specific amino acid residues in an antibody or antigen binding fragment are according to the Kabat numbering system.

[0051] “Framework region” or “FR region” refers to amino acid residues that are part of the variable region but are not part of the CDRs (e.g., using the Kabat, Chothia or AbM definition). The variable region of an antibody generally contains four FR regions: FR1, FR2, FR3 and FR4. Accordingly, the FR regions in a VL region appear in the following sequence: FR_{L}1-CDR L1-FR_{L}2-CDR L2-FR_{L}3-CDR L3-FR_{L}4, while the FR regions in a VH region appear in the following sequence: FR1_{H}-CDR H1-FR_{H}2-CDR H2-FR_{H}3-CDR H3-FR_{H}4.

[0052] “Constant region” or “constant domain” refers to a region of an immunoglobulin light chain or heavy chain that is distinct from the variable region. The constant domain of the heavy chain generally comprises at least one of: a CH1 domain, a Hinge (e.g., upper, middle, and/or lower hinge region), a CH2 domain, and a CH3 domain. In some embodiments, the antibody can have additional constant domains CH4 and/or CH5. In some embodiments, an antibody described herein comprises a polypeptide containing a CH1 domain; a polypeptide comprising a CH1 domain, at least a portion of a Hinge domain, and a CH2 domain; a polypeptide comprising a CH1 domain and a CH3 domain; a polypeptide comprising a CH1 domain, at least a portion of a Hinge domain, and a CH3 domain, or a polypeptide comprising a CH1 domain, at least a portion of a Hinge domain, a CH2 domain, and a CH3 domain. In some embodiments, the antibody comprises a polypeptide which includes a CH3 domain. The constant domain of a light chain is referred to a CL, and in some embodiments, can be a kappa or lambda constant region. However, it will be understood by one of ordinary skill in the art that these constant domains (e.g., the heavy chain or light chain) may be modified such that they vary in amino acid sequence from the naturally occurring immunoglobulin molecule.

[0053] “Fc region” or “Fc portion” refers to the C terminal region of an immunoglobulin heavy chain. The Fc region can be a native-sequence Fc region or a non-naturally occurring variant Fc region. Generally, the Fc region of an immunoglobulin comprises constant domains CH2 and CH3. Although the boundaries of the Fc region can vary, in some embodiments, the human IgG heavy chain Fc region can be defined to extend from an amino acid residue at position C226 or from P230 to the carboxy terminus thereof. In some embodiments, the “CH2 domain” of a human IgG Fc region, also denoted as “Cy2”, generally extends from about amino acid residue 231 to about amino acid residue 340. In some embodiments, N-linked carbohydrate chains can be interposed between the two CH2 domains of an intact native IgG molecule. In some embodiments, the CH3 domain” of a human IgG Fc region comprises residues C-terminal to the CH2 domain, e.g., from about amino acid residue 341 to about amino acid residue 447 of the Fc region. A “functional Fc region” possesses an “effector function” of a native sequence Fc region. Exemplary Fc “effector functions” include, among others, Clq binding; complement dependent cytotoxicity (CDC); Fc receptor binding; antibody dependent cell-mediated cytotoxicity (ADCC); phagocytosis; down regulation of cell-surface receptors (e.g., LT receptor); etc. Such effector functions generally require the Fc region to be combined with a binding domain (e.g., an antibody variable domain) and can be assessed using various assays known in the art.

[0054] “Native sequence Fc region” comprises an amino acid sequence identical to the amino acid sequence of an Fc region found in nature. Native sequence human Fc regions include a native sequence human IgG1 Fc region (non-A and A allotypes); native sequence human IgG2 Fc region; native sequence human IgG3 Fc region; and native sequence human IgG4 Fc region as well as naturally occurring variants thereof.

[0055] “Variant Fc region” comprises an amino acid sequence which differs from that of a native sequence Fc region by virtue of at least one amino acid modification, preferably one or more amino acid substitution(s). Preferably, the variant Fc region has at least one amino acid substitution compared to a native sequence Fc region or to the Fc region of a parent polypeptide, e.g. from about one to about ten amino acid substitutions, and preferably from about one to about five amino acid substitutions in a native sequence Fc region or in the Fc region of the parent polypeptide. The variant Fc region herein will preferably possess at least about 80% homology with a native sequence Fc region and/or with an Fc region of a parent polypeptide, and most preferably at least about 90% homology therewith, more preferably at least about 95% homology therewith.

[0056] “Affinity-matured” antibody, such as an affinity matured anti-TREM2 antibody of the present disclosure, is one with one or more alterations in one or more HVRs thereof that result in an improvement in the affinity of the antibody for antigen, compared to a parent antibody that does not possess those alteration(s). In one embodiment, an affinity-matured antibody has nanomolar or even picomolar affinities for the target antigen. Affinity-matured antibodies are produced by procedures known in the art. For example, Marks et al., Bio/Technology, 1992, 10:779-783 describes affinity maturation by VH- and VL-domain shuffling. Random mutagenesis of HVR and/or framework residues is described by, for example: Barbas et al., Proc Nat. Acad. Sci. USA., 1994, 91:3809-3813; Schier et al. Gene, 1995, 169: 147-155; Yelton et al., Immunol., 1995, 155: 1994-2004; Jackson et al., Immunol., 1995, 154(7):3310-9; and Hawkins et al, J. Mol. Biol., 1992, 226:889-896.

[0057] “Binding affinity” refers to strength of the sum total of noncovalent interactions between a ligand and its binding partner. In some embodiments, binding affinity is the intrinsic affinity reflecting a one-to-one interaction between the ligand and binding partner. The affinity is generally expressed in terms of equilibrium association (K_{A}) or dissociation constant (K_{D}), which are in turn reciprocal ratios of dissociation (k_{off}) and association rate constants (kₒₙ).

[0058] “Percent (%) sequence identity” and “percentage sequence homology” are used interchangeably herein to refer to comparisons among polynucleotides or polypeptides, and are determined by comparing two optimally aligned sequences over a comparison window, wherein the portion of the polynucleotide or polypeptide sequence in the comparison window may comprise gaps as compared to the reference sequence for optimal alignment of the two sequences. The percentage may be calculated by determining the number of positions at which the identical nucleic acid base or amino acid residue occurs in both sequences to yield the number of matched positions, dividing the number of matched positions by the total number of positions in the window of comparison and multiplying the result by 100 to yield the percentage of sequence identity. Alternatively, the percentage may be calculated by determining the number of positions at which either the identical nucleic acid base or amino acid residue occurs in both sequences or a nucleic acid base or amino acid residue is aligned with a gap to yield the number of matched positions, dividing the number of matched positions by the total number of positions in the window of comparison and multiplying the result by 100 to yield the percentage of sequence identity. Those of skill in the art appreciate that there are many established algorithms available to align two sequences. Optimal alignment of sequences for comparison can be conducted, e.g., by the local homology algorithm of Smith and Waterman, 1981, Adv Appl Math. 2:482, by the homology alignment algorithm of Needleman and Wunsch, 1970, J Mol Biol. 48:443, by the search for similarity method of Pearson and Lipman, 1988, Proc Natl Acad Sci USA. 85:2444-8, and particularly by computerized implementations of these algorithms (e.g., BLAST, ALIGN, GAP, BESTFIT, FASTA, and TFASTA; see, e.g., Mount, D. W., Bioinformatics: Sequence and Genome Analysis, 2^{nd} Ed., Cold Spring Harbor Laboratory Press, Cold Spring Harbor, New York (2013))

[0059] Examples of algorithms that are suitable for determining percent sequence identity and sequence similarity are the BLAST and BLAST 2.0, FASTDB, or ALIGN algorithms, which are publically available (e.g., NCBI: National Center for Biotechnology Information). Those skilled in the art can determine appropriate parameters for aligning sequences. For example, the BLASTN program (for nucleotide sequences) can use as defaults a wordlength (W) of 11, an expectation (E) of 10, M=5, N=−4, and a comparison of both strands. Comparison of amino acid sequences using BLASTP can use as defaults a wordlength (W) of 3, an expectation (E) of 10, and the BLOSUM62 scoring matrix (see Henikoff and Henikoff, 1989, Proc Natl Acad Sci USA. 89:10915-9).

[0060] “Amino acid substitution” refers to the replacement of one amino acid in a polypeptide with another amino acid. A “conservative amino acid substitution” refers to the interchangeability of residues having similar side chains, and thus typically involves substitution of the amino acid in the polypeptide with amino acids within the same or similar defined class of amino acids. By way of example and not limitation, an amino acid with an aliphatic side chain may be substituted with another aliphatic amino acid, e.g., alanine, valine, leucine, isoleucine, and methionine; an amino acid with hydroxyl side chain is substituted with another amino acid with a hydroxyl side chain, e.g., serine and threonine; an amino acid having aromatic side chains is substituted with another amino acid having an aromatic side chain, e.g., phenylalanine, tyrosine, tryptophan, and histidine; an amino acid with a basic side chain is substituted with another amino acid with a basic side chain, e.g., lysine, arginine, and histidine; an amino acid with an acidic side chain is substituted with another amino acid with an acidic side chain, e.g., aspartic acid or glutamic acid; and a hydrophobic or hydrophilic amino acid is replaced with another hydrophobic or hydrophilic amino acid, respectively.

[0061] “Amino acid insertion” refers to the incorporation of at least one amino acid into a predetermined amino acid sequence. An insertion can be the insertion of one or two amino acid residues; however, larger insertions of about three to about five, or up to about ten or more amino acid residues are contemplated herein.

[0062] “Amino acid deletion” refers to the removal of one or more amino acid residues from a predetermined amino acid sequence. A deletion can be the removal of one or two amino acid residues; however, larger deletions of about three to about five, or up to about ten or more amino acid residues are contemplated herein.

[0063] “Subject” refers to a mammal, including, but not limited to humans, non-human primates, and non-primates, such as goats, horses, and cows. In some embodiments, the terms “subject” and “patient” are used interchangeably herein in reference to a human subject.

[0064] “Therapeutically effective dose” or “therapeutically effective amount” or “effective dose” refers to that quantity of a compound, including a biologic compound, or pharmaceutical composition that is sufficient to result in a desired activity upon administration to a mammal in need thereof. As used herein, with respect to the pharmaceutical compositions comprising an antibody, the term “therapeutically effective amount/dose” refers to the amount/dose of the antibody or pharmaceutical composition thereof that is sufficient to produce an effective response upon administration to a mammal.

[0065] “Pharmaceutically acceptable” refers to compounds or compositions which are generally safe, non-toxic and neither biologically nor otherwise undesirable, and includes a compound or composition that is acceptable for human pharmaceutical and veterinary use. The compound or composition may be approved or approvable by a regulatory agency or listed in the U.S. Pharmacopeia or other generally recognized pharmacopeia for use in animals, including humans.

[0066] “Pharmaceutically acceptable excipient, carrier or adjuvant” refers to an excipient, carrier or adjuvant that can be administered to a subject, together with at least one therapeutic agent (e.g., an antibody of the present disclosure), and which does not destroy the pharmacological activity thereof and is generally safe, nontoxic and neither biologically nor otherwise undesirable when administered in doses sufficient to deliver a therapeutic amount of the agent.

[0067] The term “treatment” is used interchangeably herein with the term “therapeutic method” and refers to both 1) therapeutic treatments or measures that cure, slow down, lessen symptoms of, and/or halt progression of a diagnosed pathologic conditions, disease or disorder, and 2) and prophylactic/preventative measures. Those in need of treatment may include individuals already having a particular medical disease or disorder as well as those who may ultimately acquire the disorder (i.e., those at risk or needing preventive measures).

[0068] The term “subject” or “patient” as used herein refers to any individual to which the subject methods are performed. Generally, the subject is human, although as will be appreciated by those in the art, the subject may be any animal.

[0069] In some embodiments, compounds of the present invention are able to cross the blood-brain barrier (BBB). The term “blood-brain barrier” or “BBB”, as used herein, refers to the BBB proper as well as to the blood-spinal barrier. The blood-brain barrier, which consists of the endothelium of the brain vessels, the basal membrane and neuroglial cells, acts to limit penetration of substances into the brain. In some embodiments, the brain/plasma ratio of total drug is at least approximately 0.01 after administration (e.g. oral or intravenous administration) to a patient. In some embodiments, the brain/plasma ratio of total drug is at least approximately 0.03. In some embodiments, the brain/plasma ratio of total drug is at least approximately 0.06. In some embodiments, the brain/plasma ratio of total drug is at least approximately 0.1. In some embodiments, the brain/plasma ratio of total drug is at least approximately 0.2.

[0070] The term “homologue,” especially “TREM homologue” as used herein refers to any member of a series of peptides or nucleic acid molecules having a common biological activity, including antigenicity/immunogenicity and inflammation regulatory activity, and/or structural domain and having sufficient amino acid or nucleotide sequence identity as defined herein. TREM homologues can be from either the same or different species of animals.

[0071] The term “variant” as used herein refers either to a naturally occurring allelic variation of a given peptide or a recombinantly prepared variation of a given peptide or protein in which one or more amino acid residues have been modified by amino acid substitution, addition, or deletion.

[0072] The term “derivative” as used herein refers to a variation of given peptide or protein that are otherwise modified, i.e., by covalent attachment of any type of molecule, preferably having bioactivity, to the peptide or protein, including non-naturally occurring amino acids.

### Description of Treatment Methods of the Present Invention

[0073] In one aspect, the present invention provides a method of treating a disease or disorder caused by and/or associated with a CSF1R dysfunction in a human patient, the method comprising administering to the patient a compound that increases activity of TREM2. In some embodiments, the compound that increases activity of TREM2 is an agonist of TREM2. In some embodiments, the compound that increases activity of TREM2 is a compound that prevents the degradation of TREM2.

[0074] In one aspect, the present invention provides a method of treating a disease or disorder caused by and/or associated with a CSF1R dysfunction in a human patient, the method comprising administering to the patient an effective amount of an agonist of TREM2. In some embodiments, administration of the agonist of TREM2 activates DAP12 signaling pathways in the patient, resulting in an increase in microglia proliferation, microglia survival and microglia phagocytosis, which in turn results in a slowing of disease progression. In some embodiments, the agonist of TREM2 is an antibody or a small molecule.

[0075] In some embodiments, the agonist of TREM2 activates TREM2/DAP12 signaling in myeloid cells, including monocytes, dendritic cells, microglial cells and macrophages. In some embodiments, an agonist of TREM2 activates, induces, promotes, stimulates, or otherwise increases one or more TREM2 activities. TREM2 activities that are activated or increased by the agonist, include but are not limited to: TREM2 binding to DAP12; DAP12 binding to TREM2; TREM2 phosphorylation, DAP12 phosphorylation; PI3K activation; increased levels of soluble TREM2 (sTREM2); increased levels of soluble CSF1R (sCSF1R); increased expression of one or more anti-inflammatory mediators (e.g., cytokines) selected from the group consisting of IL-12p70, IL-6, and IL-10; reduced expression of one or more pro-inflammatory mediators selected from the group consisting of IFN-α4, IFN-b, IL-6, IL-12p70, IL-10, TNF, TNF-α, IL-10, IL-8, CRP, TGF-beta members of the chemokine protein families, IL-20 family members, IL-33, LIF, IFN-gamma, OSM, CNTF, TGF-beta, GM-CSF, IL-11, IL-12, IL-17, IL-18, and CRP; increased expression of one or more chemokines selected from the group consisting of CCL2, CCL4, CXCL10, CCL3 and CST7; reduced expression of TNF-α, IL-6, or both; extracellular signal-regulated kinase (ERK) phosphorylation; increased expression of C-C chemokine receptor 7 (CCR7); induction of microglial cell chemotaxis toward CCL19 and CCL21 expressing cells; an increase, normalization, or both of the ability of bone marrow-derived dendritic cells to induce antigen-specific T-cell proliferation; induction of osteoclast production, increased rate of osteoclastogenesis, or both; increasing the survival and/or function of one or more of dendritic cells, macrophages, microglial cells, M1 macrophages and/or microglial cells, activated M1 macrophages and/or microglial cells, M2 macrophages and/or microglial cells, monocytes, osteoclasts, Langerhans cells of skin, and Kupffer cells; induction of one or more types of clearance selected from the group consisting of apoptotic neuron clearance, nerve tissue debris clearance, non-nerve tissue debris clearance, bacteria or other foreign body clearance, disease-causing protein clearance, disease-causing peptide clearance, and disease-causing nucleic acid clearance; induction of phagocytosis of one or more of apoptotic neurons, nerve tissue debris, non-nerve tissue debris, bacteria, other foreign bodies, disease-causing proteins, disease-causing peptides, or disease-causing nucleic acids; normalization of disrupted TREM2/DAP12-dependent gene expression; recruitment of Syk, ZAP70, or both to the TREM2/DAP12 complex; Syk phosphorylation; increased expression of CD83 and/or CD86 on dendritic cells, macrophages, monocytes, and/or microglia; reduced secretion of one or more inflammatory cytokines selected from the group consisting of TNF-α, IL-10, IL-6, MCP-1, IFN-α4, IFN-b, IL-10, IL-8, CRP, TGF-beta members of the chemokine protein families, IL-20 family members, IL-33, LIF, IFN-gamma, OSM, CNTF, TGF-beta, GM-CSF, IL-11, IL-12, IL-17, IL-18, and CRP; reduced expression of one or more inflammatory receptors; increasing phagocytosis by macrophages, dendritic cells, monocytes, and/or microglia under conditions of reduced levels of MCSF; decreasing phagocytosis by macrophages, dendritic cells, monocytes, and/or microglia in the presence of normal levels of MCSF; increasing activity of one or more TREM2-dependent genes; or any combination thereof.

[0076] In some embodiments, an agonist of TREM2 increases levels of soluble TREM2 (sTREM2). In some embodiments, an agonist of TREM2 decreases levels of soluble TREM2 (sTREM2).

[0077] In some embodiments, the agonist of TREM2 causes increased expression of one or more of IL-4, CCL8, FasL, CSF1, CSF2, FIZZ1, CD206, Arg1, Ym1, IGF-1, Chi313, Fzd1, and IL-34. In some embodiments, the agonist of TREM2 causes decreased expression of one or more of IL-12p40, IL-27, CSF3, CCR5, ABCD1 and CH25H.

[0078] In another aspect, the invention provides a TREM2 agonist for the manufacture of a medicament for the treatment of a disease or disorder caused by and/or associated with a CSF1R dysfunction.

[0079] In another aspect, the invention provides a TREM2 agonist for use in treating a disease or disorder caused by and/or associated with a CSF1R dysfunction in a human patient.

### I. Diseases and Disorders

[0080] The methods of the present invention can be used to treat any disease or disorder related to a dysfunction in CSF1R. In some embodiments, the patient is selected for treatment based on a diagnosis that includes the presence of a mutation in a CSF1R gene affecting the function of CSF1R. In some embodiments, the mutation in the CSF1R gene is a mutation that causes a decrease in CSF1R activity or a cessation of CSF1R activity.

[0081] In some embodiments, the disease or disorder is caused by a heterozygous CSF1R mutation. In some embodiments, the disease or disorder is caused by a homozygous CSF1R mutation. In some embodiments, the disease or disorder is caused by a splice mutation in the csf1r gene. In some embodiments, the disease or disorder is caused by a missense mutation in the csf1r gene.

[0082] In some embodiments, the disease or disorder is caused by a mutation in the catalytic kinase domain of CSF1R. In some embodiments, the disease or disorder is caused by a mutation in an immunoglobulin domain of CSF1R. In some embodiments, the disease or disorder is caused by a mutation in the ectodomain of CSF1R.

[0083] In some embodiments, the disease or disorder is a disease or disorder resulting from a change (e.g. increase, decrease or cessation) in the activity of CSF1R. In some embodiments, the disease or disorder is a disease or disorder resulting from a decrease or cessation in the activity of CSF1R. CSF1R related activities that are changed in the disease or disorder include, but are not limited to: decrease or loss of microglia function; increased microglia apoptosis; decrease in Src signaling; decrease in Syk signaling; decreased microglial proliferation; decreased microglial response to cellular debris; decreased phagocytosis; and decreased release of cytokines in response to stimuli.

[0084] In some embodiments, the disease or disorder is caused by a loss-of-function mutation in CSF1R. In some embodiments, the loss-of-function mutation results in a complete cessation of CSF1R function. In some embodiments, the loss-of-function mutation results in a partial loss of CSF1R function, or a decrease in CSF1R activity.

[0085] In some embodiments, the disease or disorder is a neurodegenerative disorder. In some embodiments, the disease or disorder is a neurodegenerative disorder caused by and/or associated with a CSF1R dysfunction.

[0086] In some embodiments, the disease or disorder is a skeletal disorder. In some embodiments, the disease or disorder is a skeletal disorder caused by and/or associated with a CSF1R dysfunction.

[0087] In some embodiments, the disease or disorder is selected from adult-onset leukoencephalopathy with axonal spheroids and pigmented glia (ALSP), hereditary diffuse leukoencephalopathy with axonal spheroids (HIDLS), pigmentary orthochromatic leukodystrophy (POLD), pediatric-onset leukoencephalopathy, congenital absence of microglia, or brain abnormalities neurodegeneration and dysosteosclerosis (BANDDOS).

[0088] In some embodiments, the disease or disorder is selected from Nasu-Hakola disease, Alzheimer's disease, frontotemporal dementia, multiple sclerosis, Guillain-Barre syndrome, amyotrophic lateral sclerosis (ALS), Parkinson's disease, traumatic brain injury, spinal cord injury, systemic lupus erythematosus, rheumatoid arthritis, prion disease, stroke, osteoporosis, osteopetrosis, osteosclerosis, skeletal dysplasia, dysosteoplasia, Pyle disease, cerebral autosomal dominant arteriopathy with subcortical infarcts and leukoencephalopathy, cerebral autosomal recessive arteriopathy with subcortical infarcts and leukoencephalopathy, cerebroretinal vasculopathy, or metachromatic leukodystrophy wherein any of the aforementioned diseases or disorders are present in a patient exhibiting CSF1R dysfunction, or having a mutation in a gene affecting the function of CSF1R.

[0089] In some embodiments, the disease or disorder is ALSP, which is an encompassing and superseding name for both HDLS and POLD.

[0090] In some embodiments, the disease or disorder is a homozygous mutation in CSF1R. In some embodiments, the disease or disorder is pediatric-onset leukoencephalopathy. In some embodiments, the disease or disorder is congenital absence of microglia. In some embodiments, the disease or disorder is brain abnormalities neurodegeneration and dysosteosclerosis (BANDDOS).

[0091] In some embodiments, the disease or disorder is skeletal dysplasia wherein the patient has been found to have a mutation in one or more CSF1R genes affecting CSF1R function. In some embodiments, the disease or disorder is skeletal dysplasia, wherein the patient has a loss-of function mutation in CSF1R.

[0092] In some embodiments, the disease or disorder is osteosclerosis wherein the patient has been found to have a mutation in one or more CSF1R genes affecting CSF1R function. In some embodiments, the disease or disorder is osteosclerosis, wherein the patient has a loss-of function mutation in CSF1R.

[0093] In some embodiments, the disease or disorder is Alzheimer's disease wherein the patient has been found to have a mutation in one or more CSF1R genes affecting CSF1R function. In some embodiments, the patient has been diagnosed with Alzheimer's disease based on neuropathology, and also has been found to have a mutation in one or more CSF1R genes affecting CSF1R function. In some embodiments, the disease or disorder is Alzheimer's disease, wherein the patient has a loss-of-function mutation in CSF1R.

[0094] In some embodiments, the disease or disorder is Nasu-Hakola disease wherein the patient has been found to have a mutation in one or more CSF1R genes affecting CSF1R function. In some embodiments, the patient has been diagnosed with Nasu-Hakola disease based on neuropathology, and also has been found to have a mutation in one or more CSF1R genes affecting CSF1R function. In some embodiments, the disease or disorder is Nasu-Hakola disease, wherein the patient has a loss-of-function mutation in CSF1R.

[0095] In some embodiments, the disease or disorder is Parkinson's disease wherein the patient has been found to have a mutation in one or more CSF1R genes affecting CSF1R function. In some embodiments, the patient has been diagnosed with Parkinson's disease based on neuropathology, and also has been found to have a mutation in one or more CSF1R genes affecting CSF1R function. In some embodiments, the disease or disorder is Parkinson's disease, wherein the patient has a loss-of-function mutation in CSF1R.

[0096] In some embodiments, the disease or disorder is multiple sclerosis wherein the patient has been found to have a mutation in one or more CSF1R genes affecting CSF1R function. In some embodiments, the patient has been diagnosed with multiple sclerosis based on neuropathology, and also has been found to have a mutation in one or more CSF1R genes affecting CSF1R function. In some embodiments, the disease or disorder is multiple sclerosis, wherein the patient has a loss-of-function mutation in CSF1R.

[0097] In some embodiments, the disease or disorder is ALS wherein the patient has been found to have a mutation in one or more CSF1R genes affecting CSF1R function. In some embodiments, the patient has been diagnosed with ALS based on neuropathology, and also has been found to have a mutation in one or more CSF1R genes affecting CSF1R function. In some embodiments, the disease or disorder is ALS, wherein the patient has a loss-of-function mutation in CSF1R.

[0098] In some embodiments, the disease or disorder is Guillain-Barre syndrome wherein the patient has been found to have a mutation in one or more CSF1R genes affecting CSF1R function. In some embodiments, the patient has been diagnosed with Guillain-Barre syndrome based on neuropathology, and also has been found to have a mutation in one or more CSF1R genes affecting CSF1R function. In some embodiments, the disease or disorder is Guillain-Barre syndrome, wherein the patient has a loss-of-function mutation in CSF1R.

[0099] In some embodiments, the patient also possesses a mutation in one or more of NOTCH3, HTRA1, TREX1, ARSA, EIF2B1, EIF2B2, EIF2B3, EIF2B4, and EIF2B5.

[0100] In some embodiments, the disease or disorder presents one or more symptoms selected from abnormal motor control, parkinsonism, slow movement (bradykinesia), involuntary trembling (tremor), muscle stiffness (rigidity), cognitive decline, dementia, inability to speak, inability to walk, memory loss, personality changes, seizures, depression, loss of executive function, loss of impulse control, loss of attention span, and incontinence.

[0101] In some embodiments, the disease or disorder causes one or more physiological abnormalities selected from, but not limited to, abnormal brain white matter, brain matter calcification, corpus callosum agenesis, Dandy-Walker malformation and bone cysts.

[0102] In one aspect, the present invention provides a method of treating ALSP in a human patient, the method comprising administering to the patient a compound that increases activity of TREM2. In some embodiments, the compound that increases activity of TREM2 is an agonist of TREM2. In some embodiments, the compound that increases activity of TREM2 is a compound that prevents the degradation of TREM2.

[0103] In one aspect, the present invention provides a method of treating ALSP in a human patient, the method comprising administering to the patient an effective amount of an agonist of TREM2. In some embodiments, administration of the agonist of TREM2 activates DAP12 signaling pathways in the patient, resulting in an increase in microglia proliferation, microglia survival and microglia phagocytosis, which in turn results in a slowing of disease progression in ALSP. In some embodiments, the agonist of TREM2 is an antibody or a small molecule.

[0104] In another aspect, the invention provides a TREM2 agonist for the manufacture of a medicament for the treatment of ALSP.

[0105] In another aspect, the invention provides a TREM2 agonist for use in treating ALSP in a human patient.

### II. Antibodies

[0106] In one aspect, the present invention provides a method of treating ALSP in a human patient, the method comprising administering to the patient an effective amount of an antigen binding protein or an antibody, or an antigen-binding fragment thereof, which increases the activity of TREM2. In some embodiments, the antibody is an agonist of TREM2. In some embodiments, the antibody is an agonist of TREM2 that specifically binds to and activates human TREM2.

[0107] The TREM2 agonist antibodies specifically bind to human TREM2 (SEQ ID NO: 1) or an extra cellular domain (ECD) of human TREM2 (e.g. ECD set forth in SEQ ID NO: 2), for example with an equilibrium dissociation constant (K_{D}) less than 50 nM, less than 25 nM, less than 10 nM, or less than 5 nM. In some embodiments, the TREM2 agonist antibodies do not cross-react with other TREM proteins, such as human TREM1. In some embodiments, the TREM2 agonist antibodies do not bind to human TREM1 (SEQ ID NO: 4).

[0108] In some embodiments, the TREM2 antibody specifically binds to human TREM2 residues 19-174 (SEQ ID NO: 1). In some embodiments, the TREM2 antibody specifically binds to IgV region of human TREM2, for example human TREM2 residues 19-140 (SEQ ID NO: 1).

[0109] In certain embodiments, anti-TREM2 antibodies of the present disclosure bind to one or more amino acids within amino acid residues 29-112 of human TREM 2 (SEQ ID NO: 1), or within amino acid residues on a TREM2 protein corresponding to amino acid residues 29-112 of SEQ ID NO: 1. In some embodiments, anti-TREM2 antibodies of the present disclosure bind to one or more amino acids within amino acid residues 29-41 of human TREM 2 (SEQ ID NO: 1), or within amino acid residues on a TREM2 protein corresponding to amino acid residues 29-41 of SEQ ID NO: 1. In some embodiments, anti-TREM2 antibodies of the present disclosure bind to one or more amino acids within amino acid residues 47-69 of human TREM 2 (SEQ ID NO: 1), or within amino acid residues on a TREM2 protein corresponding to amino acid residues 47-69 of SEQ ID NO: 1. In some embodiments, anti-TREM2 antibodies of the present disclosure bind to one or more amino acids within amino acid residues 76-86 of human TREM 2 (SEQ ID NO: 1), or within amino acid residues on a TREM2 protein corresponding to amino acid residues 76-86 of SEQ ID NO: 1. In some embodiments, anti-TREM2 antibodies of the present disclosure bind to one or more amino acids within amino acid residues 91-100 of human TREM2 (SEQ ID NO: 1), or within amino acid residues on a TREM2 protein corresponding to amino acid residues 91-100 of SEQ ID NO: 1. In some embodiments, anti-TREM2 antibodies of the present disclosure bind to one or more amino acids within amino acid residues 99-115 of human TREM 2 (SEQ ID NO: 1), or within amino acid residues on a TREM2 protein corresponding to amino acid residues 99-115 of SEQ ID NO: 1. In some embodiments, anti-TREM2 antibodies of the present disclosure bind to one or more amino acids within amino acid residues 104-112 of human TREM 2 (SEQ ID NO: 1), or within amino acid residues on a TREM2 protein corresponding to amino acid residues 104-112 of SEQ ID NO: 1. In some embodiments, anti-TREM2 antibodies of the present disclosure bind to one or more amino acids within amino acid residues 114-118 of human TREM 2 (SEQ ID NO: 1), or within amino acid residues on a TREM2 protein corresponding to amino acid residues 114-118 of SEQ ID NO: 1. In some embodiments, anti-TREM2 antibodies of the present disclosure bind to one or more amino acids within amino acid residues 130-171 of human TREM 2 (SEQ ID NO: 1), or within amino acid residues on a TREM2 protein corresponding to amino acid residues 130-171 of SEQ ID NO: 1. In some embodiments, anti-TREM2 antibodies of the present disclosure bind to one or more amino acids within amino acid residues 139-153 of human TREM 2 (SEQ ID NO: 1), or within amino acid residues on a TREM2 protein corresponding to amino acid residues 139-153 of SEQ ID NO: 1. In some embodiments, anti-TREM2 antibodies of the present disclosure bind to one or more amino acids within amino acid residues 139-146 of human TREM 2 (SEQ ID NO: 1), or within amino acid residues on a TREM2 protein corresponding to amino acid residues 139-146 of SEQ ID NO: 1. In some embodiments, anti-TREM2 antibodies of the present disclosure bind to one or more amino acids within amino acid residues 130-144 of human TREM 2 (SEQ ID NO: 1), or within amino acid residues on a TREM2 protein corresponding to amino acid residues 130-144 of SEQ ID NO: 1. In some embodiments, anti-TREM2 antibodies of the present disclosure bind to one or more amino acids within amino acid residues 158-171 of human TREM 2 (SEQ ID NO: 1), or within amino acid residues on a TREM2 protein corresponding to amino acid residues 158-171 of SEQ ID NO: 1.

[0110] In some embodiments, anti-TREM2 antibodies of the present disclosure bind to one or more amino acids within amino acid residues 43-50 of human TREM 2 (SEQ ID NO: 1), or within amino acid residues on a TREM2 protein corresponding to amino acid residues 43-50 of SEQ ID NO: 1. In some embodiments, anti-TREM2 antibodies of the present disclosure bind to one or more amino acids within amino acid residues 49-57 of human TREM 2 (SEQ ID NO: 1), or within amino acid residues on a TREM2 protein corresponding to amino acid residues 49-57 of SEQ ID NO: 1. In some embodiments, anti-TREM2 antibodies of the present disclosure bind to one or more amino acids within amino acid residues 139-146 of human TREM 2 (SEQ ID NO: 1), or within amino acid residues on a TREM2 protein corresponding to amino acid residues 139-146 of SEQ ID NO: 1. In some embodiments, anti-TREM2 antibodies of the present disclosure bind to one or more amino acids within amino acid residues 140-153 of human TREM 2 (SEQ ID NO: 1), or within amino acid residues on a TREM2 protein corresponding to amino acid residues 140-153 of SEQ ID NO: 1. In some embodiments, the TREM2 antibody specifically binds to the stalk region of human TREM2, for example amino acid residues 145-174 of human TREM2.

[0111] In some embodiments, the antibody, or an antigen-binding fragment thereof, specifically binds TREM2 and prevents the degradation or cleavage of TREM2.

[0112] In some embodiments, the antibody is a polyclonal antibody. In some embodiments, the antibody is a monoclonal antibody. In some embodiments, the antibody is a chimeric antibody. In some embodiments, the antibody is a humanized antibody. In some embodiments, the antibody is a human antibody, particularly a fully human antibody. In some embodiments, the antibody is a bispecific or other multivalent antibody. In some embodiments, the antibody is a single chain antibody.

[0113] In some embodiments, a TREM2 activating antibody comprise a light chain variable region comprising complementarity determining regions CDRL1, CDRL2, and CDRL3 and a heavy chain variable region comprising complementarity determining regions CDRH1, CDRH2, and CDRH3 described herein.

[0114] In certain embodiments, the TREM2 agonist antigen binding proteins of the invention comprise at least one light chain variable region comprising a CDRL1, CDRL2, and CDRL3, and at least one heavy chain variable region comprising a CDRH1, CDRH2, and CDRH3 from an anti-TREM2 agonist antibody described herein.

[0115] In some embodiments, a TREM2 activating antibody comprises a light chain variable region and a heavy chain variable region described herein. The light chain and heavy chain variable regions or CDRs may be from any of the anti-TREM2 antibodies or a variant thereof described herein.

A. PCT Patent Application Publication No. WO2018/195506A1

[0116] In some embodiments, the TREM2 agonist is an antigen binding protein or an antibody, or an antigen-binding fragment thereof, as described in PCT Patent Application Publication No. WO2018/195506A1, which is incorporated by reference herein, in its entirety.

[0117] In some embodiments, the TREM2 agonist antigen binding protein comprises a CDRL1 or a variant thereof having one, two, three or four amino acid substitutions; a CDRL2, or a variant thereof having one, two, three or four amino acid substitutions; a CDRL3, or a variant thereof having one, two, three or four amino acid substitutions; a CDRH1, or a variant thereof having one, two, three or four amino acid substitutions; a CDRH2, or a variant thereof having one, two, three or four amino acid substitutions; and a CDRH3, or a variant thereof having one, two, three or four amino acid substitutions, where the amino acid sequences of the CDRL1, CDRL2, CDRL3, CDRH1, CDRH2, and CDRH3 are provided in Tables 1A and 1B below, along with exemplary light chain and variable regions

TABLE 1A
Exemplary Anti-Human TREM2 Antibody Light Chain
Variable Region Amino Acid Sequences

| Ab | VL | VL Amino Acid | | | |
|---|---|---|---|---|---|
| ID. | Group | Sequence | CDRL1 | CDRL2 | CDRL3 |
| 12G10 | LV- | QAVPTQPSSLSASPG | TLRSGINVGTYRIY | YKSDSDKQQGS | MIWYSSAVV |
| | 01 | VLASLTCTLRSGINV | (SEQ ID NO: 5) | (SEQ ID NO: | (SEQ ID |
| | | GTYRIYWYQQKPGSP | | 19) | NO: 31) |
| | | PQYLLRYKSDSDKQQ | | | |
| | | GSGVPSRFSGSKDAS | | | |
| | | ANAGILLISGLQSED | | | |
| | | EADYYCMIWYSSAVV | | | |
| | | FGGGTKLTVL (SEQ | | | |
| | | ID NO: 46) | | | |
| 26A10 | LV- | SYELTQPPSVSVSPG | SGDKLGDKYVC | QDSKRPS | QAWDSNTVV |
| | 02 | QTASITCSGDKLGDK | (SEQ ID NO: 6) | (SEQ ID NO: | (SEQ ID |
| | | YVCWYQQKPGQSPVL | | 20) | NO: 32) |
| | | VIYQDSKRPSGIPER | | | |
| | | FSGSNSGNTATLTIS | | | |
| | | GTQAMDEADYYCQAW | | | |
| | | DSNTVVFGGGTKLTV | | | |
| | | L (SEQ ID NO: | | | |
| | | 47) | | | |
| 26C10 | LV- | SFELTQPPSVSVSPG | SGDKLGDKYVC | QDTKRPS | QAWDSSTVV |
| | 03 | QTASITCSGDKLGDK | (SEQ ID NO: 6) | (SEQ ID NO: | (SEQ ID |
| | | YVCWYQQKPGQSPML | | 21) | NO: 33) |
| | | VIYQDTKRPSGIPER | | | |
| | | FSGSNSGNTATLTIS | | | |
| | | GTQAMDEADYYCQAW | | | |
| | | DSSTVVFGGGTKLTV | | | |
| | | L (SEQ ID NO: | | | |
| | | 48) | | | |
| 26F2 | LV- | SYELTQPPSVSVSPG | SGDKLGDKYVC | QDSKRPS | QAWDSSTVV |
| | 04 | QTASITCSGDKLGDK | (SEQ ID NO: 6) | (SEQ ID NO: | (SEQ ID |
| | | YVCWYQQKPGQSPVL | | 20) | NO: 33) |
| | | VIFQDSKRPSGIPER | | | |
| | | FSGSNSGNTATLTIS | | | |
| | | GTQAMDEADYYCQAW | | | |
| | | DSSTVVFGGGTKLTV | | | |
| | | L (SEQ ID NO: | | | |
| | | 49) | | | |
| 33B12 | LV- | SYELTQPPSVSVSPG | SGDKLGDKYVC | QDSKRPS | QAWDSSTVV |
| | 05 | QTASITCSGDKLGDK | (SEQ ID NO: 6) | (SEQ ID NO: | (SEQ ID |
| | | YVCWYQQKPGQSPVL | | 20) | NO: 33) |
| | | VIYQDSKRPSGIPER | | | |
| | | FSGSNSGNTATLTIS | | | |
| | | GTQAMDEADYYCQAW | | | |
| | | DSSTVVFGGGTKLTV | | | |
| | | L (SEQ ID NO: | | | |
| | | 50) | | | |
| 24C12 | LV- | GIVMTQSPDSLAVSL | KSSRSVLYSSNNKNYLA | WASTRES | QQYYITPIT |
| | 06 | GERATINCKSSRSVL | (SEQ ID NO: 7) | (SEQ ID NO: | (SEQ ID |
| | | YSSNNKNYLAWYQQK | | 22) | NO: 34) |
| | | PGQPPKVLIYWASTR | | | |
| | | ESGVPDRFSGSGSGT | | | |
| | | DFTLTISSLQAEDVA | | | |
| | | VYNCQQYYITPITFG | | | |
| | | QGTRLEIK (SEQ | | | |
| | | ID NO: 51) | | | |
| 24G6 | LV- | DIVMTQSPDSLAVSL | KSSQSVLYSSNNKHFLA | WASTRES | QQYYSTPLT |
| | 07 | GERATINCKSSQSVL | (SEQ ID NO: 8) | (SEQ ID NO: | (SEQ ID |
| | | YSSNNKHFLAWYQQK | | 22) | NO: 35) |
| | | PGQPPKLLIYWASTR | | | |
| | | ESGVPDRFSGSGSGT | | | |
| | | DFTLTISSLQAEDVA | | | |
| | | FYYCQQYYSTPLTFG | | | |
| | | GGTKVEIK (SEQ | | | |
| | | ID NO: 52) | | | |
| 24A10 | LV- | DIVMTQSPDSLAVSL | KSSHNVLYSSNNKNYLA | WASTRES | HQYYSTPCS |
| | 08 | GERATITCKSSHNVL | (SEQ ID NO: 9) | (SEQ ID NO: | (SEQ ID |
| | | YSSNNKNYLAWYQQK | | 22) | NO: 36) |
| | | PGQPPKLLIYWASTR | | | |
| | | ESGVPDRFSGSGSGT | | | |
| | | DFTLTISSLQAEDVA | | | |
| | | VYYCHQYYSTPCSFG | | | |
| | | QGTKLEIK (SEQ | | | |
| | | ID NO: 53) | | | |
| 10E3 | LV- | EIVMTQSPATLSVSP | RASQSVSSNLA | GASTRAT | LQDNNWPPT |
| | 09 | GERATLSCRASQSVS | (SEQ ID NO: 10) | (SEQ ID NO: | (SEQ ID |
| | | SNLAWFQQKPGQAPR | | 23) | NO: 37) |
| | | LLIYGASTRATGIPA | | | |
| | | RFSVSGSGTEFTLTI | | | |
| | | SSLQSEDFAFYYCLQ | | | |
| | | DNNWPPTFGPGTKVD | | | |
| | | IK (SEQ ID NO: | | | |
| | | 54) | | | |
| 13E7 | LV- | EIVMTQSPATLSVSP | RASQSVSSNLA | GASTRAT | LQDNNWPPT |
| 14C12 | 10 | GERATLSCRASQSVS | (SEQ ID NO: 10) | (SEQ ID NO: | (SEQ ID |
| | | SNLAWFQQKPGQAPR | | 23) | NO: 37) |
| | | LLIYGASTRATGIPA | | | |
| | | RFSVSGSGTEFTLTI | | | |
| | | SSLQSEDFAVYYCLQ | | | |
| | | DNNWPPTFGPGTKVD | | | |
| | | IK (SEQ ID NO: | | | |
| | | 55) | | | |
| 25F12 | LV- | EKVMTQSPATLSVSP | RASQSVNNNLA | GASTRAT | QQYNNWPRT |
| | 11 | GERATLSCRASQSVN | (SEQ ID NO: 11) | (SEQ ID NO: | (SEQ ID |
| | | NNLAWYQQKPGQAPR | | 23) | NO: 38) |
| | | LLIYGASTRATGIPA | | | |
| | | RFSGSGSGTEFTLTI | | | |
| | | SSLQSEDFAVYYCQQ | | | |
| | | YNNWPRTFGQGTKVE | | | |
| | | IK (SEQ ID NO: | | | |
| | | 56) | | | |
| 32E3 | LV- | EFVLTQSPGTLSLSP | RASQIISSNYLA | SASSRAT | QQFDSSPIT |
| | 12 | GERATLSCRASQIIS | (SEQ ID NO: 12) | (SEQ ID NO: | (SEQ ID |
| | | SNYLAWYQQKPGQAP | | 24) | NO: 39) |
| | | RLLIYSASSRATGIP | | | |
| | | DRFSGSGSGTDFTLT | | | |
| | | ISRLEPEDFAVYYCQ | | | |
| | | QFDSSPITFGRGTRL | | | |
| | | DIK (SEQ ID NO: | | | |
| | | 57) | | | |
| 24F4 | LV- | EIVLTQSPGTLSLSP | RASQSVSSSYLA | GASSRAT | QQYDTSPFT |
| | 13 | GERATLSCRASQSVS | (SEQ ID NO: 13) | (SEQ ID NO: | (SEQ ID |
| | | SSYLAWYQQKPGQAP | | 25) | NO: 40) |
| | | RLLIYGASSRATGIP | | | |
| | | DRFSGSGSGTDFILT | | | |
| | | ISRLEPEDFALYYCQ | | | |
| | | QYDTSPFTFGPGTKV | | | |
| | | DIK (SEQ ID NO: | | | |
| | | 58) | | | |
| 16B8 | LV- | DIQMTQSPSSVSASV | RASQDINSWLA | AASSLQT | QQSNSFPIT |
| | 14 | GDRVIVICRASQDIN | (SEQ ID NO: 14) | (SEQ ID NO: | (SEQ ID |
| | | SWLAWYQQKPGKAPK | | 26) | NO: 41) |
| | | LLIYAASSLQTGVPS | | | |
| | | RFSGSGSGTDFILTI | | | |
| | | SSLQPEDFATYSCQQ | | | |
| | | SNSFPITFGQGTRLE | | | |
| | | IK (SEQ ID NO: | | | |
| | | 59) | | | |
| 4C5 | LV- | DIQMTQSPSSVSASV | RASQGISNWLA | AASSLQV | QQADSFPRN |
| | 15 | GDRVTITCRASQGIS | (SEQ ID NO: 15) | (SEQ ID NO: | (SEQ ID |
| | | NWLAWYQQKPGKAPK | | 27) | NO: 42) |
| | | LLIYAASSLQVGVPL | | | |
| | | RFSGSGSGTDFILTI | | | |
| | | SSLQPEDFATYYCQQ | | | |
| | | ADS FPRNFGQGTKLE | | | |
| | | IK (SEQ ID NO: | | | |
| | | 60) | | | |
| 6E7 | LV- | DIQMTQSPSSVSASV | RASQGISSWLA | AASSLQN | QQADSFPRT |
| | 16 | GDRVTITCRASQGIS | (SEQ ID NO: 16) | (SEQ ID NO: | (SEQ ID |
| | | SWLAWYQQKPGKAPK | | 28) | NO: 43) |
| | | LLIYAASSLQNGVPS | | | |
| | | RFSGSGSGTDFILTI | | | |
| | | SSLQPEDFATYFCQQ | | | |
| | | ADSFPRTFGQGTKLE | | | |
| | | IK (SEQ ID NO: | | | |
| | | 61) | | | |
| 5E3 | LV- | DIQMTQSPSSLSASV | RASQGISNYLA | AASSLQS | QQYSTYPFT |
| | 17 | GDRVTITCRASQGIS | (SEQ ID NO: 17) | (SEQ ID NO: | (SEQ ID |
| | | NYLAWFQQKPGKAPK | | 29) | NO: 44) |
| | | SLIYAASSLQSGVPS | | | |
| | | KFSGSGSGTDFILTI | | | |
| | | SSLQPEDFATYYCQQ | | | |
| | | YSTYPFTFGPGTKVD | | | |
| | | IK (SEQ ID NO: | | | |
| | | 62) | | | |
| 4G10 | LV- | DIQMTQSPSSLSASV | RASQGIRNDLG | AASSLPS | LQHNSYPWT |
| | 18 | GDRVTITCRASQGIR | (SEQ ID NO: 18) | (SEQ ID NO: | (SEQ ID |
| | | NDLGWYQQKPGNAPK | | 30) | NO: 45) |
| | | RLIYAASSLPSGVPS | | | |
| | | RFSGSGSGPEFTLTI | | | |
| | | SSLQPEDFATYYCLQ | | | |
| | | HNSYPWTFGQGTKVE | | | |
| | | IT (SEQ ID NO: | | | |
| | | 63) | | | |

TABLE 1B
Exemplary Anti-Human TREM2 Antibody Heavy Chain Variable Region Amino Acid
Sequences

| Ab | VE | VH Amino Acid | | | |
|---|---|---|---|---|---|
| ID. | Group | Sequence | CDRH1 | CDRH2 | CDRH3 |
| 12G10 | HV- | EVQLLESGGGLVQ | SYAMS (SEQ | AIGGGGVSTYCA | FYIAVAGSHFDY |
| 24C12 | 01 | PGGSLRLSCAASG | ID NO: 77) | DSVKG (SEQ | (SEQ ID NO: 95) |
| | | FTFSSYAMSWVRQ | | ID NO: 87) | |
| | | APGKGLEWVSAIG | | | |
| | | GGGVSTYCADSVK | | | |
| | | GRFTISRDNSKNT | | | |
| | | LYLQMNSLRAEDT | | | |
| | | AVYYCAKFYIAVA | | | |
| | | GSHFDYWGQGTLV | | | |
| | | TVSS | | | |
| | | (SEQ ID NO: | | | |
| | | 110) | | | |
| 26A10 | HV- | EVQLVESGGALVQ | SFGMS (SEQ | YISSSSFTIYYA | EGGLTMVRGVSSYGLDV |
| | 02 | RGGSLRLSCAASR | ID NO: 78) | DSVKG (SEQ | (SEQ ID NO: 96) |
| | | FTFSSFGMSWVRQ | | ID NO: 88) | |
| | | APGKGLEWVSYIS | | | |
| | | SSSFTIYYADSVK | | | |
| | | GRFTISRDNAKNS | | | |
| | | FYLQMNSLRDEDT | | | |
| | | AVYYCAREGGLTM | | | |
| | | VRGVSSYGLDVWG | | | |
| | | QGTTVTVSS | | | |
| | | (SEQ ID NO: | | | |
| | | 111) | | | |
| 26C10 | HV- | EVQLVESGGALVQ | SFGMS (SEQ | YISSSSFTIYYA | EGGITMVRGVSSYGMDV |
| | 03 | PGGSLRLSCAASG | ID NO: 78) | DSVKG (SEQ | (SEQ ID NO: 97) |
| | | FTFSSFGMSWVRQ | | ID NO: 88) | |
| | | APGKGLEWVSYIS | | | |
| | | SSSFTIYYADSVK | | | |
| | | GRFTISRDNAKNS | | | |
| | | FYLQMNSLRDEDT | | | |
| | | AVYFCVREGGITM | | | |
| | | VRGVSSYGMDVWG | | | |
| | | QGTTVTVSS | | | |
| | | (SEQ ID NO: | | | |
| | | 112) | | | |
| 26F2 | HV- | EVQLVESGGALVQ | SFGMS (SEQ | YISSSSFTIYYA | EGGITMVRGVSSYGMDV |
| | 04 | PGGSLRLSCAASG | ID NO: 78) | DSVKG (SEQ | (SEQ ID NO: 97) |
| | | FTFSSFGMSWVRQ | | ID NO: 88) | |
| | | APGKGLEWISYIS | | | |
| | | SSSFTIYYADSVK | | | |
| | | GRFTISRDNAKNS | | | |
| | | FYLQMNSLRDEDT | | | |
| | | AVYFCAREGGITM | | | |
| | | VRGVSSYGMDVWG | | | |
| | | QGTTVTVSS | | | |
| | | (SEQ ID NO: | | | |
| | | 113) | | | |
| 33B12 | HV- | EVQLVESGGALVQ | SFGMS (SEQ | YISKSSFTIYYA | EGGLTMVRGVSSYGLDV |
| | 05 | PGGSLRLSCAASG | ID NO: 78) | DSVKG (SEQ | (SEQ ID NO: 96) |
| | | FTFSSFGMSWVRQ | | ID NO: 89) | |
| | | APGKGLEWVSYIS | | | |
| | | KSSFTIYYADSVK | | | |
| | | GRFTISRDNAKNS | | | |
| | | FYLQMNSLRDEDT | | | |
| | | AVYYCAREGGLTM | | | |
| | | VRGVSSYGLDVWG | | | |
| | | QGTTVTVSS | | | |
| | | (SEQ ID NO: | | | |
| | | 114) | | | |
| 24G6 | HV- | EVQLLESGGGLVQ | SYAMS (SEQ | AISGSGGSTYYA | AYTPMAFFDY |
| | 06 | PGGSLRLSCAASG | ID NO: 77) | DSVKG (SEQ | (SEQ ID NO: 98) |
| | | FTFSSYAMSWVRQ | | ID NO: 90) | |
| | | APGKGLEWVSAIS | | | |
| | | GSGGSTYYADSVK | | | |
| | | GRFTISRDNSKNT | | | |
| | | LYLQMNSLRAEDT | | | |
| | | AVYYCAKAYT PMA | | | |
| | | FFDYWGQGTLVTV | | | |
| | | SS | | | |
| | | (SEQ ID NO: | | | |
| | | 115) | | | |
| 24A10 | HV- | EVQVLESGGGLVQ | NYAMS (SEQ | AISGSGGSTYYA | GGWELFY |
| | 07 | PGGSLRLSCAASG | ID NO: 79) | DSVKG (SEQ | (SEQ ID NO: 99) |
| | | FTFSNYAMSWVRQ | | ID NO: 90) | |
| | | APGKGLEWVSAIS | | | |
| | | GSGGSTYYADSVK | | | |
| | | GRFTISRDNSKNT | | | |
| | | LYLQMNSLRAEDT | | | |
| | | AVYYCAKGGWELF | | | |
| | | YWGQGTLVTVSS | | | |
| | | (SEQ ID NO: | | | |
| | | 116) | | | |
| 10E3 | HV- | EVQLVQSGAEVKK | NYWIG (SEQ | IIYPGDSDTRYS | RRQGIWGDALDI |
| | 08 | PGESLMISCKGSG | ID NO: 80) | PSFQG (SEQ | (SEQ ID NO: 100) |
| | | YSFTNYWIGWVRQ | | ID NO: 91) | |
| | | MPGKGLEWMGIIY | | | |
| | | PGDSDTRYSPSFQ | | | |
| | | GQVTISADKSIST | | | |
| | | AYLQWSSLKASDT | | | |
| | | AMYFCARRRQGIW | | | |
| | | GDALDIWGQGTLV | | | |
| | | TVSS | | | |
| | | (SEQ ID NO: | | | |
| | | 117) | | | |
| 13E7 | HV- | EVQLVQSGAEVKK | SYWIG (SEQ | IIYPGDSDTRYS | RRQGIWGDALDF |
| 14C12 | 09 | PGESLMISCKGSG | ID NO: 81) | PSFQG (SEQ | (SEQ ID NO: 101) |
| | | YSFTSYWIGWVRQ | | ID NO: 91) | |
| | | MPGKGLEWMGIIY | | | |
| | | PGDSDTRYSPSFQ | | | |
| | | GQVTISADKSIST | | | |
| | | AYLQWSSLKASDT | | | |
| | | AMYFCARRRQGIW | | | |
| | | GDALDFWGQGTLV | | | |
| | | TVSS | | | |
| | | (SEQ ID NO: | | | |
| | | 118) | | | |
| 25F12 | HV- | QVQLQQWGAGLLK | SYYWS (SEQ | EINHSGNTNYNP | EGYYDILTGYHDAFDI |
| | 10 | PSETLSLTCAVYG | ID NO: 82) | SLKS (SEQ ID | (SEQ ID NO: 102) |
| | | GSFSSYYWSWIRQ | | NO: 92) | |
| | | PPGKGLEWIGEIN | | | |
| | | HSGNTNYNPSLKS | | | |
| | | RVTISVDTSKNQF | | | |
| | | SLKLSSVTAADTA | | | |
| | | VYYCAREGYYDIL | | | |
| | | TGYHDAFDIWDQG | | | |
| | | TMVTVFS | | | |
| | | (SEQ ID NO: | | | |
| | | 119) | | | |
| 32E3 | HV- | EVQLVQSGAEVKK | SYWIG (SEQ | IIYPGDSDTRYS | HDIIPAAPGAFDI |
| | 11 | PGESLKISCKGSG | ID NO: 81) | PSFQG (SEQ | (SEQ ID NO: 103) |
| | | YSFTSYWIGWVRQ | | ID NO: 91) | |
| | | MPGKGLEWMGIIY | | | |
| | | PGDSDTRYSPSFQ | | | |
| | | GQVTISADKSIST | | | |
| | | AYLQWSTLKASDT | | | |
| | | AIYYCARHDIIPA | | | |
| | | APGAFDIWGQGTM | | | |
| | | VTVSS | | | |
| | | (SEQ ID NO: | | | |
| | | 120) | | | |
| 24F4 | HV- | EVQLVQSGAEVKK | SYWIG (SEQ | IIYPGDSDTRYS | QAIAVTGLGGFDP |
| | 12 | PGESLKISCKGSG | ID NO: 81) | PSFQG (SEQ | (SEQ ID NO: 104) |
| | | YTFTSYWIGWVRQ | | ID NO: 91) | |
| | | MPGKGLEWMGIIY | | | |
| | | PGDSDTRYSPSFQ | | | |
| | | GQVTISVDKSSST | | | |
| | | AYLQWSSLKASDT | | | |
| | | AIYYCTRQAIAVT | | | |
| | | GLGGFDPWGQGTL | | | |
| | | VTVSS | | | |
| | | (SEQ ID NO: | | | |
| | | 121) | | | |
| 16B8 | HV- | QVQLVQSGAEVKK | NYGIS (SEQ | WISAYNGNTNYA | RGYSYGSFDY |
| | 13 | PGASVKVSCKASG | ID NO: 83) | QKLQG (SEQ | (SEQ ID NO: 105) |
| | | YTFTNYGISWVRQ | | ID NO: 93) | |
| | | APGQGLEWMGWIS | | | |
| | | AYNGNTNYAQKLQ | | | |
| | | GRVTMTTDTSTST | | | |
| | | VYMELRSLRSDDT | | | |
| | | AVYYCARRGYSYG | | | |
| | | SFDYWGQGTLVTV | | | |
| | | SS | | | |
| | | (SEQ ID NO: | | | |
| | | 122) | | | |
| 4C5 | HV- | EVQLVQSGAEVKK | NYWIA (SEQ | IIYPGDSDTRYS | QRTFYYDSSGYFDY |
| | 14 | PGESLKISCKGSG | ID NO: 84) | PSFQG (SEQ | (SEQ ID NO: 106) |
| | | HSFTNYWIAWVRQ | | ID NO: 91) | |
| | | MPGKGLEWMGIIY | | | |
| | | PGDSDTRYSPSFQ | | | |
| | | GQVTISADKSIST | | | |
| | | AYLQWSSLKASDT | | | |
| | | AVYFCARQRTFYY | | | |
| | | DSSGYFDYWGQGT | | | |
| | | LVTVSS | | | |
| | | (SEQ ID NO: | | | |
| | | 123) | | | |
| 6E7 | HV- | EVQLVQSGAEVKK | SYWIA (SEQ | IIYPGDSDTRYS | QRTFYYDSSDYFDY |
| | 15 | PGESLKISCKGSG | ID NO: 85) | PSFQG (SEQ | (SEQ ID NO: 107) |
| | | YSFTSYWIAWVRQ | | ID NO: 91) | |
| | | MPGKGLEWMGIIY | | | |
| | | PGDSDTRYSPSFQ | | | |
| | | GQVTISADKSIST | | | |
| | | AYLQWSSLKASDT | | | |
| | | AMYFCARQRTFYY | | | |
| | | DSSDYFDYWGQGT | | | |
| | | LVTVSS | | | |
| | | (SEQ ID NO: | | | |
| | | 124) | | | |
| 5E3 | HV- | QVQLVQSGAEVKK | GYYIH (SEQ | WINPYSGGTTSA | DGGYLALYGTDV |
| | 16 | PGASVKVSCKASG | ID NO: 86) | QKFQG (SEQ | (SEQ ID NO: 108) |
| | | YTFTGYYIHWVRQ | | ID NO: 94) | |
| | | APGLGLEWMGWIN | | | |
| | | PYSGGTTSAQKFQ | | | |
| | | GRVTMTRDTSISS | | | |
| | | AYMELSRLRSDDT | | | |
| | | AVYYCARDGGYLA | | | |
| | | LYGTDVWGQGTTV | | | |
| | | TVSS | | | |
| | | (SEQ ID NO: | | | |
| | | 125) | | | |
| 4G10 | HV- | EVQLVQSGAEVKK | SYWIA (SEQ | IIYPGDSDTRYS | QGIEVTGTGGLDV |
| | 17 | PGESLKISCKGSG | ID NO: 85) | PSFQG (SEQ | (SEQ ID NO: 109) |
| | | YSFPSYWIAWVRQ | | ID NO: 91) | |
| | | MPGKGLEWMGIIY | | | |
| | | PGDSDTRYSPSFQ | | | |
| | | GQVTISADKSIST | | | |
| | | AFLKWSSLKASDT | | | |
| | | AMYFCARQGIEVT | | | |
| | | GTGGLDVWGQGTT | | | |
| | | VTVSS | | | |
| | | (SEQ ID NO: | | | |
| | | 126) | | | |

[0118] As noted above, a TREM2 agonist antigen binding protein may comprise one or more of the CDRs presented in Table 1A (light chain CDRs; i.e. CDRLs) and Table 1B (heavy chain CDRs, i.e. CDRHs).

[0119] In some embodiments, the TREM2 agonist antigen binding protein comprises one or more light chain CDRs selected from (i) a CDRL1 selected from SEQ ID NOs: 5 to 18, (ii) a CDRL2 selected from SEQ ID NOs: 19 to 30, and (iii) a CDRL3 selected from SEQ ID NOs: 31 to 45, and (iv) a CDRL of (i), (ii) and (iii) that contains one or more, e.g., one, two, three, four or more amino acid substitutions (e.g., conservative amino acid substitutions), deletions or insertions of no more than five, four, three, two, or one amino acids. In these and other embodiments, the TREM2 agonist antigen binding proteins comprise one or more heavy chain CDRs selected from (i) a CDRH1 selected from SEQ ID NOs: 77 to 86, (ii) a CDRH2 selected from SEQ ID NOs: 87 to 94, and (iii) a CDRH3 selected from SEQ ID NOs: 95 to 109, and (iv) a CDRH of (i), (ii) and (iii) that contains one or more, e.g., one, two, three, four or more amino acid substitutions (e.g., conservative amino acid substitutions), deletions or insertions of no more than five, four, three, two, or one amino acids amino acids.

[0120] In some embodiments, the TREM2 agonist antigen binding protein may comprise 1, 2, 3, 4, 5, or 6 variant forms of the CDRs listed in Tables 1A and 1B, each having at least 80%, 85%, 90% or 95% sequence identity to a CDR sequence listed in Tables 1A and 1B. In some embodiments, the TREM2 agonist antigen binding protein includes 1, 2, 3, 4, 5, or 6 of the CDRs listed in Tables 1A and 1B, each differing by no more than 1, 2, 3, 4 or 5 amino acids from the CDRs listed in these tables.

[0121] In some embodiments, the TREM2 agonist antigen binding protein comprises a CDRL1 comprising a sequence selected from SEQ ID NOs: 5-18 or a variant thereof having one, two, three or four amino acid substitutions; a CDRL2 comprising a sequence selected from SEQ ID NOs: 19-30 or a variant thereof having one, two, three or four amino acid substitutions; a CDRL3 comprising a sequence selected from SEQ ID NOs: 31-45 or a variant thereof having one, two, three or four amino acid substitutions; a CDRH1 comprising a sequence selected from SEQ ID NOs: 77-86 or a variant thereof having one, two, three or four amino acid substitutions; a CDRH2 comprising a sequence selected from SEQ ID NOs: 87-94 or a variant thereof having one, two, three or four amino acid substitutions; and a CDRH3 comprising a sequence selected from SEQ ID NOs: 95-109 or a variant thereof having one, two, three or four amino acid substitutions.

[0122] In some embodiments, the TREM2 agonist antigen binding proteins of the invention comprise a CDRL1 comprising a sequence selected from SEQ ID NOs: 5-18; a CDRL2 comprising a sequence selected from SEQ ID NOs: 19-30; a CDRL3 comprising a sequence selected from SEQ ID NOs: 31-45; a CDRH1 comprising a sequence selected from SEQ ID NOs: 77-86; a CDRH2 comprising a sequence selected from SEQ ID NOs: 87-94; and a CDRH3 comprising a sequence selected from SEQ ID NOs: 95-109.

[0123] In some embodiments, the TREM2 agonist antigen binding protein comprise a light chain variable region comprising a CDRL1, a CDRL2, and a CDRL3, wherein:
[0124] (a) CDRL1, CDRL2, and CDRL3 have the sequence of SEQ ID NOs: 5, 19, and 31, respectively;
[0125] (b) CDRL1, CDRL2, and CDRL3 have the sequence of SEQ ID NOs: 6, 20, and 32, respectively;
[0126] (c) CDRL1, CDRL2, and CDRL3 have the sequence of SEQ ID NOs: 6, 21, and 33, respectively;
[0127] (d) CDRL1, CDRL2, and CDRL3 have the sequence of SEQ ID NOs: 6, 20, and 33, respectively;
[0128] (e) CDRL1, CDRL2, and CDRL3 have the sequence of SEQ ID NOs: 7, 22, and 34, respectively;
[0129] (f) CDRL1, CDRL2, and CDRL3 have the sequence of SEQ ID NOs: 8, 22, and 35, respectively;
[0130] (g) CDRL1, CDRL2, and CDRL3 have the sequence of SEQ ID NOs: 9, 22, and 36, respectively;
[0131] (h) CDRL1, CDRL2, and CDRL3 have the sequence of SEQ ID NOs: 10, 23, and 37, respectively;
[0132] (i) CDRL1, CDRL2, and CDRL3 have the sequence of SEQ ID NOs: 11, 23, and 38, respectively;
[0133] (j) CDRL1, CDRL2, and CDRL3 have the sequence of SEQ ID NOs: 12, 24, and 39, respectively;
[0134] (k) CDRL1, CDRL2, and CDRL3 have the sequence of SEQ ID NOs: 13, 25, and 40, respectively;
[0135] (l) CDRL1, CDRL2, and CDRL3 have the sequence of SEQ ID NOs: 14, 26, and 41, respectively;
[0136] (m) CDRL1, CDRL2, and CDRL3 have the sequence of SEQ ID NOs: 15, 27, and 42, respectively;
[0137] (n) CDRL1, CDRL2, and CDRL3 have the sequence of SEQ ID NOs: 16, 28, and 43, respectively;
[0138] (o) CDRL1, CDRL2, and CDRL3 have the sequence of SEQ ID NOs: 17, 29, and 44, respectively, or
[0139] (p) CDRL1, CDRL2, and CDRL3 have the sequence of SEQ ID NOs: 18, 30, and 45, respectively.

[0140] In some embodiments, the TREM2 agonist antigen binding protein comprises a heavy chain variable region comprising a CDRH1, a CDRH2, and a CDRH3, wherein:
[0141] (a) CDRH1, CDRH2, and CDRH3 have the sequence of SEQ ID NOs: 77, 87, and 95, respectively;
[0142] (b) CDRH1, CDRH2, and CDRH3 have the sequence of SEQ ID NOs: 78, 88, and 96, respectively;
[0143] (c) CDRH1, CDRH2, and CDRH3 have the sequence of SEQ ID NOs: 78, 88, and 97, respectively;
[0144] (d) CDRH1, CDRH2, and CDRH3 have the sequence of SEQ ID NOs: 78, 89, and 96, respectively;
[0145] (e) CDRH1, CDRH2, and CDRH3 have the sequence of SEQ ID NOs: 77, 90, and 98, respectively;
[0146] (f) CDRH1, CDRH2, and CDRH3 have the sequence of SEQ ID NOs: 79, 90, and 99, respectively;
[0147] (g) CDRH1, CDRH2, and CDRH3 have the sequence of SEQ ID NOs: 80, 91, and 100, respectively;
[0148] (h) CDRH1, CDRH2, and CDRH3 have the sequence of SEQ ID NOs: 81, 91, and 101, respectively;
[0149] (i) CDRH1, CDRH2, and CDRH3 have the sequence of SEQ ID NOs: 82, 92, and 102, respectively;
[0150] (j) CDRH1, CDRH2, and CDRH3 have the sequence of SEQ ID NOs: 81, 91, and 103, respectively;
[0151] (k) CDRH1, CDRH2, and CDRH3 have the sequence of SEQ ID NOs: 81, 91, and 104, respectively;
[0152] (l) CDRH1, CDRH2, and CDRH3 have the sequence of SEQ ID NOs: 83, 93, and 105, respectively;
[0153] (m) CDRH1, CDRH2, and CDRH3 have the sequence of SEQ ID NOs: 84, 91, and 106, respectively;
[0154] (n) CDRH1, CDRH2, and CDRH3 have the sequence of SEQ ID NOs: 85, 91, and 107, respectively;
[0155] (o) CDRH1, CDRH2, and CDRH3 have the sequence of SEQ ID NOs: 86, 94, and 108, respectively; or
[0156] (p) CDRH1, CDRH2, and CDRH3 have the sequence of SEQ ID NOs: 85, 91, and 109, respectively.

[0157] In some embodiments, the TREM2 agonist antigen binding protein comprises a light chain variable region comprising a CDRL1, a CDRL2, and a CDRL3 and a heavy chain variable region comprising a CDRH1, a CDRH2, and a CDRH3, wherein:
[0158] (a) CDRL1, CDRL2, and CDRL3 have the sequence of SEQ ID NOs: 5, 19, and 31, respectively, and CDRH1, CDRH2, and CDRH3 have the sequence of SEQ ID NOs: 77, 87, and 95, respectively;
[0159] (b) CDRL1, CDRL2, and CDRL3 have the sequence of SEQ ID NOs: 6, 20, and 32, respectively, and CDRH1, CDRH2, and CDRH3 have the sequence of SEQ ID NOs: 78, 88, and 96, respectively;
[0160] (c) CDRL1, CDRL2, and CDRL3 have the sequence of SEQ ID NOs: 6, 21, and 33, respectively, and CDRH1, CDRH2, and CDRH3 have the sequence of SEQ ID NOs: 78, 88, and 97, respectively;
[0161] (d) CDRL1, CDRL2, and CDRL3 have the sequence of SEQ ID NOs: 6, 20, and 33, respectively, and CDRH1, CDRH2, and CDRH3 have the sequence of SEQ ID NOs: 78, 88, and 97, respectively;
[0162] (e) CDRL1, CDRL2, and CDRL3 have the sequence of SEQ ID NOs: 6, 20, and 33, respectively, and CDRH1, CDRH2, and CDRH3 have the sequence of SEQ ID NOs: 78, 89, and 96, respectively;
[0163] (f) CDRL1, CDRL2, and CDRL3 have the sequence of SEQ ID NOs: 7, 22, and 34, respectively, and CDRH1, CDRH2, and CDRH3 have the sequence of SEQ ID NOs: 77, 87, and 95, respectively;
[0164] (g) CDRL1, CDRL2, and CDRL3 have the sequence of SEQ ID NOs: 8, 22, and 35, respectively, and CDRH1, CDRH2, and CDRH3 have the sequence of SEQ ID NOs: 77, 90, and 98, respectively;
[0165] (h) CDRL1, CDRL2, and CDRL3 have the sequence of SEQ ID NOs: 9, 22, and 36, respectively, and CDRH1, CDRH2, and CDRH3 have the sequence of SEQ ID NOs: 79, 90, and 99, respectively;
[0166] (i) CDRL1, CDRL2, and CDRL3 have the sequence of SEQ ID NOs: 10, 23, and 37, respectively, and CDRH1, CDRH2, and CDRH3 have the sequence of SEQ ID NOs: 80, 91, and 100, respectively;
[0167] (j) CDRL1, CDRL2, and CDRL3 have the sequence of SEQ ID NOs: 10, 23, and 37, respectively, and CDRH1, CDRH2, and CDRH3 have the sequence of SEQ ID NOs: 81, 91, and 101, respectively;
[0168] (k) CDRL1, CDRL2, and CDRL3 have the sequence of SEQ ID NOs: 11, 23, and 38, respectively, and CDRH1, CDRH2, and CDRH3 have the sequence of SEQ ID NOs: 82, 92, and 102, respectively;
[0169] (l) CDRL1, CDRL2, and CDRL3 have the sequence of SEQ ID NOs: 12, 24, and 39, respectively, and CDRH1, CDRH2, and CDRH3 have the sequence of SEQ ID NOs: 81, 91, and 103, respectively;
[0170] (m) CDRL1, CDRL2, and CDRL3 have the sequence of SEQ ID NOs: 13, 25, and 40, respectively, and CDRH1, CDRH2, and CDRH3 have the sequence of SEQ ID NOs: 81, 91, and 104, respectively;
[0171] (n) CDRL1, CDRL2, and CDRL3 have the sequence of SEQ ID NOs: 14, 26, and 41, respectively, and CDRH1, CDRH2, and CDRH3 have the sequence of SEQ ID NOs: 83, 93, and 105, respectively;
[0172] (o) CDRL1, CDRL2, and CDRL3 have the sequence of SEQ ID NOs: 15, 27, and 42, respectively, and CDRH1, CDRH2, and CDRH3 have the sequence of SEQ ID NOs: 84, 91, and 106, respectively;
[0173] (p) CDRL1, CDRL2, and CDRL3 have the sequence of SEQ ID NOs: 16, 28, and 43, respectively, and CDRH1, CDRH2, and CDRH3 have the sequence of SEQ ID NOs: 85, 91, and 107, respectively;
[0174] (q) CDRL1, CDRL2, and CDRL3 have the sequence of SEQ ID NOs: 17, 29, and 44, respectively, and CDRH1, CDRH2, and CDRH3 have the sequence of SEQ ID NOs: 86, 94, and 108, respectively; or
[0175] (r) CDRL1, CDRL2, and CDRL3 have the sequence of SEQ ID NOs: 18, 30, and 45, respectively, and CDRH1, CDRH2, and CDRH3 have the sequence of SEQ ID NOs: 85, 91, and 109, respectively.

[0176] In some embodiments, the TREM2 agonist antigen binding protein comprises a light chain variable region comprising a CDRL1, a CDRL2, and a CDRL3 and a heavy chain variable region comprising a CDRH1, a CDRH2, and a CDRH3, wherein CDRL1, CDRL2, and CDRL3 have the sequence of SEQ ID NOs: 10, 23, and 37, respectively, and CDRH1, CDRH2, and CDRH3 have the sequence of SEQ ID NOs: 80, 91, and 100, respectively. In some embodiments, the TREM2 agonist antigen binding protein comprises a light chain variable region comprising a CDRL1, a CDRL2, and a CDRL3 and a heavy chain variable region comprising a CDRH1, a CDRH2, and a CDRH3, wherein CDRL1, CDRL2, and CDRL3 have the sequence of SEQ ID NOs: 10, 23, and 37, respectively, and CDRH1, CDRH2, and CDRH3 have the sequence of SEQ ID NOs: 81, 91, and 101, respectively. In some embodiments, the TREM2 agonist antigen binding protein comprises a light chain variable region comprising a CDRL1, a CDRL2, and a CDRL3 and a heavy chain variable region comprising a CDRH1, a CDRH2, and a CDRH3, wherein CDRL1, CDRL2, and CDRL3 have the sequence of SEQ ID NOs: 15, 27, and 42, respectively, and CDRH1, CDRH2, and CDRH3 have the sequence of SEQ ID NOs: 84, 91, and 106, respectively. In some embodiments, the TREM2 agonist antigen binding protein comprises a light chain variable region comprising a CDRL1, a CDRL2, and a CDRL3 and a heavy chain variable region comprising a CDRH1, a CDRH2, and a CDRH3, wherein CDRL1, CDRL2, and CDRL3 have the sequence of SEQ ID NOs: 16, 28, and 43, respectively, and CDRH1, CDRH2, and CDRH3 have the sequence of SEQ ID NOs: 85, 91, and 107, respectively. In some embodiments, the TREM2 agonist antigen binding protein comprises a light chain variable region comprising a CDRL1, a CDRL2, and a CDRL3 and a heavy chain variable region comprising a CDRH1, a CDRH2, and a CDRH3, wherein CDRL1, CDRL2, and CDRL3 have the sequence of SEQ ID NOs: 17, 29, and 44, respectively, and CDRH1, CDRH2, and CDRH3 have the sequence of SEQ ID NOs: 86, 94, and 108, respectively. In some embodiments, the TREM2 agonist antigen binding protein comprises a light chain variable region comprising a CDRL1, a CDRL2, and a CDRL3 and a heavy chain variable region comprising a CDRH1, a CDRH2, and a CDRH3, wherein CDRL1, CDRL2, and CDRL3 have the sequence of SEQ ID NOs: 8, 22, and 35, respectively, and CDRH1, CDRH2, and CDRH3 have the sequence of SEQ ID NOs: 77, 90, and 98, respectively.

[0177] In some embodiments, the TREM2 agonist antigen binding proteins comprise a light chain variable region comprising a sequence selected from SEQ ID NOs: 46-63 and a heavy chain variable region comprising a sequence selected from SEQ ID NOs: 110-126. In some embodiments, the TREM2 agonist antigen binding protein comprises a light chain variable region comprising the sequence of SEQ ID NO: 46 and a heavy chain variable region comprising the sequence of SEQ ID NO: 110. In some embodiments, the TREM2 agonist antigen binding protein comprises a light chain variable region comprising the sequence of SEQ ID NO: 47 and a heavy chain variable region comprising the sequence of SEQ ID NO: 111. In some embodiments, the TREM2 agonist antigen binding protein comprises a light chain variable region comprising the sequence of SEQ ID NO: 48 and a heavy chain variable region comprising the sequence of SEQ ID NO: 112. In some embodiments, the TREM2 agonist antigen binding protein comprises a light chain variable region comprising the sequence of SEQ ID NO: 49 and a heavy chain variable region comprising the sequence of SEQ ID NO: 113. In some embodiments, the TREM2 agonist antigen binding protein comprises a light chain variable region comprising the sequence of SEQ ID NO: 50 and a heavy chain variable region comprising the sequence of SEQ ID NO: 114. In some embodiments, the TREM2 agonist antigen binding protein comprises a light chain variable region comprising the sequence of SEQ ID NO: 51 and a heavy chain variable region comprising the sequence of SEQ ID NO: 110. In some embodiments, the TREM2 agonist antigen binding protein comprises a light chain variable region comprising the sequence of SEQ ID NO: 53 and a heavy chain variable region comprising the sequence of SEQ ID NO: 116. In some embodiments, the TREM2 agonist antigen binding protein comprises a light chain variable region comprising the sequence of SEQ ID NO: 54 and a heavy chain variable region comprising the sequence of SEQ ID NO: 117. In some embodiments, the TREM2 agonist antigen binding protein comprises a light chain variable region comprising the sequence of SEQ ID NO: 55 and a heavy chain variable region comprising the sequence of SEQ ID NO: 118. In some embodiments, the TREM2 agonist antigen binding protein comprises a light chain variable region comprising the sequence of SEQ ID NO: 56 and a heavy chain variable region comprising the sequence of SEQ ID NO: 119. In some embodiments, the TREM2 agonist antigen binding protein comprises a light chain variable region comprising the sequence of SEQ ID NO: 57 and a heavy chain variable region comprising the sequence of SEQ ID NO: 120. In some embodiments, the TREM2 agonist antigen binding protein comprises a light chain variable region comprising the sequence of SEQ ID NO: 58 and a heavy chain variable region comprising the sequence of SEQ ID NO: 121. In some embodiments, the TREM2 agonist antigen binding protein comprises a light chain variable region comprising the sequence of SEQ ID NO: 59 and a heavy chain variable region comprising the sequence of SEQ ID NO: 122. In some embodiments, the TREM2 agonist antigen binding protein comprises a light chain variable region comprising the sequence of SEQ ID NO: 60 and a heavy chain variable region comprising the sequence of SEQ ID NO: 123. In some embodiments, the TREM2 agonist antigen binding protein comprises a light chain variable region comprising the sequence of SEQ ID NO: 61 and a heavy chain variable region comprising the sequence of SEQ ID NO: 124. In some embodiments, the TREM2 agonist antigen binding protein comprises a light chain variable region comprising the sequence of SEQ ID NO: 62 and a heavy chain variable region comprising the sequence of SEQ ID NO: 125. In some embodiments, the TREM2 agonist antigen binding protein comprises a light chain variable region comprising the sequence of SEQ ID NO: 63 and a heavy chain variable region comprising the sequence of SEQ ID NO: 126. In yet another embodiment, the TREM2 agonist antigen binding protein comprises a light chain variable region comprising the sequence of SEQ ID NO: 52 and a heavy chain variable region comprising the sequence of SEQ ID NO: 115.

[0178] In some embodiments, the TREM2 agonist antigen binding protein may comprise a light chain variable region selected from LV-01, LV-02, LV-03, LV-04, LV-05, LV-06, LV-07, LV-08, LV-09, LV-10, LV-11, LV-12, LV-13, LV-14, LV-15, LV-16, LV-17, and LV-18, as shown in Table 1A, and/or a heavy chain variable region selected from HV-01, HV-02, HV-03, HV-04, HV-05, HV-06, HV-07, HV-08, HV-09, HV-10, HV-11, HV-12, HV-13, HV-14, HV-15, HV-16, and HV-17, as shown in Table 1B, and functional fragments, derivatives, muteins and variants of these light chain and heavy chain variable regions.

[0179] In some embodiments, each of the light chain variable regions listed in Table 1A may be combined with any of the heavy chain variable regions listed in Table 1B to form an anti-TREM2 binding domain of the antigen binding proteins of the invention. Examples of such combinations include, but are not limited to: LV-01 (SEQ ID NO: 46) and HV-01 (SEQ ID NO: 110); LV-02 (SEQ ID NO: 47) and HV-02 (SEQ ID NO: 111); LV-03 (SEQ ID NO: 48) and HV-03 (SEQ ID NO: 112); LV-04 (SEQ ID NO: 49) and HV-04 (SEQ ID NO: 113); LV-05 (SEQ ID NO: 50) and HV-05 (SEQ ID NO: 114); LV-06 (SEQ ID NO: 51) and HV-01 (SEQ ID NO: 110); LV-07 (SEQ ID NO: 52) and HV-06 (SEQ ID NO: 115); LV-08 (SEQ ID NO: 53) and HV-07 (SEQ ID NO: 116); LV-09 (SEQ ID NO: 54) and HV-08 (SEQ ID NO: 117); LV-10 (SEQ ID NO: 55) and HV-09 (SEQ ID NO: 118); LV-11 (SEQ ID NO: 56) and HV-10 (SEQ ID NO: 119); LV-12 (SEQ ID NO: 57) and HV-11 (SEQ ID NO: 120); LV-13 (SEQ ID NO: 58) and HV-12 (SEQ ID NO: 121); LV-14 (SEQ ID NO: 59) and HV-13 (SEQ ID NO: 122); LV-15 (SEQ ID NO: 60) and HV-14 (SEQ ID NO: 123); LV-16 (SEQ ID NO: 61) and HV-15 (SEQ ID NO: 124); LV-17 (SEQ ID NO: 62) and HV-16 (SEQ ID NO: 125); and LV-18 (SEQ ID NO: 63) and HV-17 (SEQ ID NO: 126).

[0180] In certain embodiments, the TREM2 agonist antigen binding proteins of the invention comprise a light chain variable region comprising the sequence of LV-09 (SEQ ID NO: 54) and a heavy chain variable region comprising the sequence of HV-08 (SEQ ID NO: 117). In some embodiments, the TREM2 agonist antigen binding proteins of the invention comprise a light chain variable region comprising the sequence of LV-10 (SEQ ID NO: 55) and a heavy chain variable region comprising the sequence of HV-09 (SEQ ID NO: 118). In other embodiments, the TREM2 agonist antigen binding proteins of the invention comprise a light chain variable region comprising the sequence of LV-15 (SEQ ID NO: 60) and a heavy chain variable region comprising the sequence of HV-14 (SEQ ID NO: 123). In still other embodiments, the TREM2 agonist antigen binding proteins of the invention comprise a light chain variable region comprising the sequence of LV-16 (SEQ ID NO: 61) and a heavy chain variable region comprising the sequence of HV-15 (SEQ ID NO: 124). In some embodiments, the TREM2 agonist antigen binding proteins of the invention comprise a light chain variable region comprising the sequence of LV-17 (SEQ ID NO: 62) and a heavy chain variable region comprising the sequence of HV-16 (SEQ ID NO: 125). In certain embodiments, the TREM2 agonist antigen binding proteins of the invention comprise a light chain variable region comprising the sequence of LV-07 (SEQ ID NO: 52) and a heavy chain variable region comprising the sequence of HV-06 (SEQ ID NO: 115).

[0181] In some embodiments, the TREM2 agonist antigen binding proteins comprise a light chain variable region comprising a sequence of contiguous amino acids that differs from the sequence of a light chain variable region in Table 1A, i.e. a VL selected from LV-01, LV-02, LV-03, LV-04, LV-05, LV-06, LV-07, LV-08, LV-09, LV-10, LV-11, LV-12, LV-13, LV-14, LV-15, LV-16, LV-17, or LV-18, at only 1, 2, 3, 4, 5, 6, 7, 8, 9, 10, 11, 12, 13, 14 or 15 amino acid residues, wherein each such sequence difference is independently either a deletion, insertion or substitution of one amino acid, with the deletions, insertions and/or substitutions resulting in no more than 15 amino acid changes relative to the foregoing variable domain sequences. The light chain variable region in some TREM2 agonist antigen binding proteins comprises a sequence of amino acids that has at least 70%, at least 75%, at least 80%, at least 85%, at least 90%, at least 95%, at least 97% or at least 99% sequence identity to the amino acid sequences of SEQ ID NOs: 46-63 (i.e. the light chain variable regions in Table 1A). In one embodiment, the TREM2 agonist antigen binding protein comprises a light chain variable region comprising a sequence that is at least 90% identical to a sequence selected from SEQ ID NOs: 46-63. In another embodiment, the TREM2 agonist antigen binding protein comprises a light chain variable region comprising a sequence that is at least 95% identical to a sequence selected from SEQ ID NOs: 46-63. In yet another embodiment, the TREM2 agonist antigen binding protein comprises a light chain variable region comprising a sequence selected from SEQ ID NOs: 46-63. In some embodiments, the TREM2 agonist antigen binding protein comprises a light chain variable region comprising a sequence of SEQ ID NO: 54. In other embodiments, the TREM2 agonist antigen binding protein comprises a light chain variable region comprising a sequence of SEQ ID NO: 55. In yet other embodiments, the TREM2 agonist antigen binding protein comprises a light chain variable region comprising a sequence of SEQ ID NO: 60. In still other embodiments, the TREM2 agonist antigen binding protein comprises a light chain variable region comprising a sequence of SEQ ID NO: 61. In certain embodiments, the TREM2 agonist antigen binding protein comprises a light chain variable region comprising a sequence of SEQ ID NO: 62. In other embodiments, the TREM2 agonist antigen binding protein comprises a light chain variable region comprising a sequence of SEQ ID NO: 52.

[0182] In these and other embodiments, the TREM2 agonist antigen binding proteins comprise a heavy chain variable region comprising a sequence of contiguous amino acids that differs from the sequence of a heavy chain variable region in Table 1B, i.e., a VH selected from HV-01, HV-02, HV-03, HV-04, HV-05, HV-06, HV-07, HV-08, HV-09, HV-10, HV-11, HV-12, HV-13, HV-14, HV-15, HV-16, or HV-17, at only 1, 2, 3, 4, 5, 6, 7, 8, 9, 10, 11, 12, 13, 14 or 15 amino acid residues, wherein each such sequence difference is independently either a deletion, insertion or substitution of one amino acid, with the deletions, insertions and/or substitutions resulting in no more than 15 amino acid changes relative to the foregoing variable domain sequences. The heavy chain variable region in some TREM2 agonist antigen binding proteins comprises a sequence of amino acids that has at least 70%, at least 75%, at least 80%, at least 85%, at least 90%, at least 95%, at least 97% or at least 99% sequence identity to the amino acid sequences of SEQ ID NOs: 110-126 (i.e. the heavy chain variable regions in Table 1B). In one embodiment, the TREM2 agonist antigen binding protein comprises a heavy chain variable region comprising a sequence that is at least 90% identical to a sequence selected from SEQ ID NOs: 110-126. In another embodiment, the TREM2 agonist antigen binding protein comprises a heavy chain variable region comprising a sequence that is at least 95% identical to a sequence selected from SEQ ID NOs: 110-126. In yet another embodiment, the TREM2 agonist antigen binding protein comprises a heavy chain variable region comprising a sequence selected from SEQ ID NOs: 110-126. In some embodiments, the TREM2 agonist antigen binding protein comprises a heavy chain variable region comprising a sequence of SEQ ID NO: 117. In other embodiments, the TREM2 agonist antigen binding protein comprises a heavy chain variable region comprising a sequence of SEQ ID NO: 118. In yet other embodiments, the TREM2 agonist antigen binding protein comprises a heavy chain variable region comprising a sequence of SEQ ID NO: 123. In still other embodiments, the TREM2 agonist antigen binding protein comprises a heavy chain variable region comprising a sequence of SEQ ID NO: 124. In certain embodiments, the TREM2 agonist antigen binding protein comprises a heavy chain variable region comprising a sequence of SEQ ID NO: 125. In other embodiments, the TREM2 agonist antigen binding protein comprises a heavy chain variable region comprising a sequence of SEQ ID NO: 115.

[0183] In some embodiments, variants of the anti-TREM2 antibodies can be generated by substituting one or more amino acids in the light chain or heavy chain variable regions to address chemical liabilities (e.g., aspartate isomerization, asparagine deamidation, tryptophan and methionine oxidation) or correct covariance violations (see e.g., WO 2012/125495, which is hereby incorporated by reference in its entirety). Such variants can have improved biophysical, expression, and/or stability properties as compared with the parental antibody. In some embodiments, the TREM2 agonist antigen binding proteins of the invention comprise a light chain variable region and/or heavy chain variable region having one or more of the amino acid substitutions set forth in any of Tables 2A-2F below.

[0184] In some embodiments, additional variants of the anti-TREM2 antibodies described herein can be generated by affinity modulating any of the anti-TREM2 antibodies described herein. An “affinity-modulated antibody” is an antibody that comprises one or more amino acid substitutions in its light chain variable region sequence and/or heavy chain variable region sequence that increases or decreases the affinity of the antibody for the target antigen as compared to the parental antibody that does not contain the amino acid substitutions. Antibody affinity modulation methods are known to those of skill in the art and can include CDR walking mutagenesis (Yang et al., J. Mol. Biol., 254, 392-403, 1995), chain shuffling (Marks et al., Bio/Technology, 10, 779-783, 1992), use of mutation strains of E. coli (Low et al., J. Mol. Biol., 250, 350-368, 1996), DNA shuffling (Patten et al., Curr. Opin. Biotechnol., 1997, 8:724-733), phage display (Thompson et al., J. Mol. Biol., 1996, 256:7-88), PCR techniques (Crameri, et al., Nature, 1998, 391:288-291), and other mutagenesis strategies (Barbas et al., Proc Nat. Acad. Sci. USA 91:3809-3813, 1994; Schier et al., Gene 169:147-155, 1995; Yelton et al., J. Immunol. 155:1994-2004, 1995; Jackson et al., J. Immunol. 154(7):3310-9, 1995; and Hawkins et al., J. Mol. Biol., 1992, 226:889-896). Methods of affinity modulation are discussed in Hoogenboom, Trends in Biotechnology, 1995, 15:62-70, and Vaughan et al., Nature Biotechnology, 1998, 16535-539. One specific method for generating affinity-modulated variants of the anti-TREM2 antibodies described herein is the use of a yeast-display Fab mutagenesis library.

[0185] In some embodiments, the TREM2 agonist antigen binding proteins comprise a light chain variable region that is a variant of a light chain variable region of any of the anti-TREM2 antibodies described herein. Thus, in some embodiments, the light chain variable region of the TREM2 agonist antigen binding proteins comprises a sequence that is at least 90% identical, at least 91% identical, at least 92% identical, at least 93% identical, at least 94% identical, or at least 95% identical to a sequence selected from SEQ ID NOs: 46-63. In some embodiments, the TREM2 agonist antigen binding proteins can comprise a light chain variable region from any of the engineered anti-TREM2 antibody variants set forth in Tables 2A-2F below.

[0186] In some embodiments, the TREM2 agonist antigen binding protein comprises a light chain variable region comprising the sequence of SEQ ID NO: 54 with a mutation at one or more amino acid positions 64, 79, 80, 85, 94, and/or 100. In some such embodiments, the mutation is V64G, V64A, Q79E, Q79D, S80P, S80A, F85V, F85L, F85A, F85D, F85I, F85L, F85M, F85T, W94F, W94Y, W94S, W94T, W94A, W94H, W94I, W94Q, P100R, P100Q, P100G, or combinations thereof. In another embodiment, the TREM2 agonist antigen binding protein comprises a light chain variable region comprising the sequence of SEQ ID NO: 55 with a mutation at one or more amino acid positions 64, 79, 80, 94, and/or 100. Such mutations can include V64G, V64A, Q79E, Q79D, S80P, S80A, W94F, W94Y, W94S, W94T, W94A, W94H, W94I, W94Q, P100R, P100Q, P100G, or combinations thereof. In certain embodiments, the mutation is V64G, V64A, Q79E, S80P, S80A, W94Y, W94S, P100R, P100Q, or combinations thereof. In another embodiment, the TREM2 agonist antigen binding protein comprises a light chain variable region comprising the sequence of SEQ ID NO: 60 with a mutation at one or more amino acid positions 60, 92, and/or 93. The mutation in such embodiments can be selected from L60S, L60P, L60D, L60A, D92E, D92Q, D92T, D92N, S93A, S93N, S93Q, S93V, or combinations thereof. In yet another embodiment, the TREM2 agonist antigen binding protein comprises a light chain variable region comprising the sequence of SEQ ID NO: 61 with a mutation at one or more amino acid positions 56, 57, 92, and/or 93. In such embodiments, the mutation can be N56S, N56T, N56Q, N56E, G57A, G57V, D92E, D92Q, D92T, D92N, S93A, S93N, S93Q, S93V, or combinations thereof. In certain embodiments, the mutation is N56S, N56Q, G57A, D92E, D92Q, S93A, or combinations thereof. In still another embodiment, the TREM2 agonist antigen binding protein comprises a light chain variable region comprising the sequence of SEQ ID NO: 62 with a mutation at amino acid position 36, 46, 61 and/or 100. Such mutations can include F36Y, S46L, S46R, S46V, S46F, K61R, P100Q, P100G, P100R or combinations thereof. In particular embodiments, the mutation is F36Y, K61R, P100Q, or combinations thereof. In another embodiment, the TREM2 agonist antigen binding protein comprises a light chain variable region comprising the sequence of SEQ ID NO: 52 with a mutation at amino acid position 91, which can be selected from F91V, F91I, F91T, F91L, or F91D. In one embodiment, the mutation is F91V.

[0187] In some embodiments, the TREM2 agonist antigen binding proteins comprise a heavy chain variable region that is a variant of a heavy chain variable region from any of the anti-TREM2 antibodies described herein. Thus, in some embodiments, the heavy chain variable region of the TREM2 agonist antigen binding proteins comprises a sequence that is at least 90% identical, at least 91% identical, at least 92% identical, at least 93% identical, at least 94% identical, or at least 95% identical to a sequence selected from SEQ ID NOs: 110-126. For instance, the TREM2 agonist antigen binding proteins can comprise a heavy chain variable region from any of the engineered anti-TREM2 antibody variants set forth in Tables 2A-2F below. In one embodiment, the TREM2 agonist antigen binding protein comprises a heavy chain variable region comprising the sequence of SEQ ID NO: 117 with a mutation at one or more amino acid positions 19, 55, 56, 57, 58, and/or 104. In some such embodiments, the mutation is M19K, M19R, M19T, M19E, M19N, M19Q, D55E, D55Q, D55N, D55T, S56A, S56Q, S56V, D57S, D57E, D57Q, T58A, T58V, W104F, W104Y, W104T, W104S, W104A, W104H, W104I, W104Q, or combinations thereof. In another embodiment, the TREM2 agonist antigen binding protein comprises a heavy chain variable region comprising the sequence of SEQ ID NO: 118 with a mutation at one or more amino acid positions 19, 55, 56, 57, 58, and/or 104. Such mutations can include M19K, M19R, M19T, M19E, M19N, M19Q, D55E, D55Q, D55N, D55T, S56A, S56Q, S56V, D57S, D57E, D57Q, T58A, T58V, W104F, W104Y, W104T, W104S, W104A, W104H, W104I, W104Q, or combinations thereof. In certain embodiments, the mutation is M19K, D55E, S56A, D57E, T58A, W104Y, W104T, or combinations thereof. In another embodiment, the TREM2 agonist antigen binding protein comprises a heavy chain variable region comprising the sequence of SEQ ID NO: 123 with a mutation at one or more amino acid positions 27, 55, 56, 57, 58, 105, and/or 106. In some embodiments, the mutation is selected from H27Y, H27D, H27F, H27N, D55E, D55Q, D55N, D55T, S56A, S56Q, S56V, D57S, D57E, D57Q, T58A, T58V, D105E, D105Q, D105T, D105N, D105G, S106A, S106Q, S106V, S106T, or combinations thereof. In yet another embodiment, the TREM2 agonist antigen binding protein comprises a heavy chain variable region comprising the sequence of SEQ ID NO: 124 with a mutation at one or more amino acid positions 55, 56, 57, 58, 105, and/or 106. The mutation in such embodiments can be selected from D55E, D55Q, D55N, D55T, S56A, S56Q, S56V, D57S, D57E, D57Q, T58A, T58V, D105E, D105Q, D105T, D105N, D105G, S106A, S106Q, S106V, S106T, or combinations thereof. In certain embodiments, the mutation is D55E, D55Q, S56A, D57E, T58A, D105E, D105N, S106A, or combinations thereof. In still another embodiment, the TREM2 agonist antigen binding protein comprises a heavy chain variable region comprising the sequence of SEQ ID NO: 125 with a mutation at one or more amino acid positions 43, 76, 85, 99, 100, and/or 116. Such mutations can include L43Q, L43K, L43H, I76T, R85S, R85G, R85N, R85D, D99E, D99Q, D99S, D99T, G100A, G100Y, G100V, T116L, T116M, T116P, T116R, or combinations thereof. In certain embodiments, the mutation is L43Q, R85S, D99E, G100A, G100Y, T116L, or combinations thereof. In another embodiment, the TREM2 agonist antigen binding protein comprises a heavy chain variable region comprising the sequence of SEQ ID NO: 115 with a mutation at amino acid position 62 and/or 63. In such embodiments, the mutation can be selected from D62E, D62Q, D62T, D62N, S63A, S63Q, S63V, or combinations thereof. In some embodiments, the mutation is D62E, D62Q, S63A, or combinations thereof. In some embodiments, the TREM2 agonist antigen binding proteins comprise a light chain variable region and/or heavy chain variable region from any of the anti-TREM2 variant antibodies set forth in Tables 2A, 2B, 3A, 3B, and 19. Accordingly, in some embodiments, the light chain variable region of the TREM2 agonist antigen binding proteins comprises a sequence that is at least 90% identical, at least 91% identical, at least 92% identical, at least 93% identical, at least 94% identical, or at least 95% identical to a sequence selected from SEQ ID NOs: 61, 153-162, and 295-300. In these and other embodiments, the heavy chain variable region of the TREM2 agonist antigen binding proteins comprises a sequence that is at least 90% identical, at least 91% identical, at least 92% identical, at least 93% identical, at least 94% identical, or at least 95% identical to a sequence selected from SEQ ID NOs: 124, 180-190, and 307-312.

[0188] In some embodiments, the TREM2 agonist antigen binding protein comprises a light chain variable region comprising the sequence of SEQ ID NO: 54 with a mutation at one or more amino acid positions 64, 79, 80, 85, 94, and/or 100. Such mutations can include V64G, V64A, Q79E, Q79D, S80P, S80A, F85V, F85L, F85A, F85D, F85I, F85L, F85M, F85T, W94F, W94Y, W94S, W94T, W94A, W94H, W94I, W94Q, P100R, P100Q, P100G, or combinations thereof. In these and other embodiments, the TREM2 agonist antigen binding protein comprises a heavy chain variable region comprising the sequence of SEQ ID NO: 117 with a mutation at one or more amino acid positions 19, 55, 56, 57, 58, and/or 104. In certain embodiments, the mutation is selected from M19K, M19R, M19T, M19E, M19N, M19Q, D55E, D55Q, D55N, D55T, S56A, S56Q, S56V, D57S, D57E, D57Q, T58A, T58V, W104F, W104Y, W104T, W104S, W104A, W104H, W104I, W104Q, or combinations thereof.

[0189] In other embodiments, the TREM2 agonist antigen binding protein comprises a light chain variable region comprising the sequence of SEQ ID NO: 55 with a mutation at one or more amino acid positions 64, 79, 80, 94, and/or 100. In some embodiments, the mutation is selected from V64G, V64A, Q79E, Q79D, S80P, S80A, W94F, W94Y, W94S, W94T, W94A, W94H, W94I, W94Q, P100R, P100Q, P100G, or combinations thereof. In certain embodiments, the mutation is selected from V64G, V64A, Q79E, S80P, S80A, W94Y, W94S, P100R, P100Q, or combinations thereof. For instance, in some embodiments, the TREM2 agonist antigen binding protein comprises a light chain variable region comprising the sequence of SEQ ID NO: 55 with one or more mutations selected from V64G, Q79E, S80P, W94Y, and P100Q. In these and other embodiments, the TREM2 agonist antigen binding protein comprises a heavy chain variable region comprising the sequence of SEQ ID NO: 118 with a mutation at one or more amino acid positions 19, 55, 56, 57, 58, and/or 104. Such mutations can include M19K, M19R, M19T, M19E, M19N, M19Q, D55E, D55Q, D55N, D55T, S56A, S56Q, S56V, D57S, D57E, D57Q, T58A, T58V, W104F, W104Y, W104T, W104S, W104A, W104H, W104I, W104Q, or combinations thereof. In certain embodiments, the mutation is selected from M19K, D55E, S56A, D57E, T58A, W104Y, W104T, or combinations thereof.

[0190] In certain other embodiments, the TREM2 agonist antigen binding protein comprises a light chain variable region comprising the sequence of SEQ ID NO: 60 with a mutation at one or more amino acid positions 60, 92, and/or 93. The mutation can be selected from L60S, L60P, L60D, L60A, D92E, D92Q, D92T, D92N, S93A, S93N, S93Q, S93V, or combinations thereof. In these and other embodiments, the TREM2 agonist antigen binding protein comprises a heavy chain variable region comprising the sequence of SEQ ID NO: 123 with a mutation at one or more amino acid positions 27, 55, 56, 57, 58, 105, and/or 106. In some embodiments, the mutation is selected from H27Y, H27D, H27F, H27N, D55E, D55Q, D55N, D55T, S56A, S56Q, S56V, D57S, D57E, D57Q, T58A, T58V, D105E, D105Q, D105T, D105N, D105G, S106A, S106Q, S106V, S106T, or combinations thereof.

[0191] In some embodiments, the TREM2 agonist antigen binding protein comprises a light chain variable region comprising the sequence of SEQ ID NO: 61 with a mutation at one or more amino acid positions 56, 57, 92, and/or 93. In certain embodiments, the mutation is selected from N56S, N56T, N56Q, N56E, G57A, G57V, D92E, D92Q, D92T, D92N, S93A, S93N, S93Q, S93V, or combinations thereof. In some embodiments, the mutation is selected from N56S, N56Q, G57A, D92E, D92Q, S93A, or combinations thereof. In particular embodiments, the TREM2 agonist antigen binding protein comprises a light chain variable region comprising the sequence of SEQ ID NO: 61 with one or more mutations selected from N56S, D92E, and S93A. In these and other embodiments, the TREM2 agonist antigen binding protein comprises a heavy chain variable region comprising the sequence of SEQ ID NO: 124 with a mutation at one or more amino acid positions 55, 56, 57, 58, 105, and/or 106. The mutation can be selected from D55E, D55Q, D55N, D55T, S56A, S56Q, S56V, D57S, D57E, D57Q, T58A, T58V, D105E, D105Q, D105T, D105N, D105G, S106A, S106Q, S106V, S106T, or combinations thereof. In certain embodiments, the mutation is D55E, D55Q, S56A, D57E, T58A, D105E, D105N, S106A, or combinations thereof. In some embodiments, the TREM2 agonist antigen binding protein comprises a heavy chain variable region comprising the sequence of SEQ ID NO: 124 with one or more mutations selected from D55E, S56A, D57E, D105E, and S106A.

[0192] In other embodiments, the TREM2 agonist antigen binding protein comprises a light chain variable region comprising the sequence of SEQ ID NO: 62 with a mutation at amino acid position 36, 46, 61 and/or 100. In particular embodiments, the mutation is selected from F36Y, S46L, S46R, S46V, S46F, K61R, P100Q, P100G, P100R or combinations thereof. In some embodiments, the mutation is F36Y, K61R, P100Q, or combinations thereof. In some embodiments, the mutation is S46L, P100Q, or combinations thereof. In these and other embodiments, the TREM2 agonist antigen binding protein comprises a heavy chain variable region comprising the sequence of SEQ ID NO: 125 with a mutation at one or more amino acid positions 43, 76, 85, 99, 100, and/or 116. The mutation can be selected from L43Q, L43K, L43H, I76T, R85S, R85G, R85N, R85D, D99E, D99Q, D99S, D99T, G100A, G100Y, G100V, Ti 16L, Ti 16M, T116P, T116R, or combinations thereof. In certain embodiments, the mutation is L43Q, I76T, R85S, D99E, G100A, G100Y, T116L, or combinations thereof.

[0193] In still other embodiments, the TREM2 agonist antigen binding protein comprises a light chain variable region comprising the sequence of SEQ ID NO: 52 with a mutation at amino acid position 91. The mutation can be selected from F91V, F91I, F91T, F91L, or F91D. In one embodiment, the mutation is F91V. In these and other embodiments, the TREM2 agonist antigen binding protein comprises a heavy chain variable region comprising the sequence of SEQ ID NO: 115 with a mutation at amino acid position 62 and/or 63. In particular embodiments, the mutation is selected from D62E, D62Q, D62T, D62N, S63A, S63Q, S63V, or combinations thereof. In some embodiments, the mutation is selected from D62E, D62Q, S63A, or combinations thereof.

TABLE 2A
Engineered Variants of 10E3 Antibody

| | | | | |
|---|---|---|---|---|
| Position in | | | | |
| 10E3 VL | | | Parent | |
| Sequence or | | | Amino | Amino Acid |
| VH sequence | Region | Hot Spot | Acid | Substitutions |

Light chain variable sequence (SEQ ID NO: 54)

| | | | | |
|---|---|---|---|---|
| 64 | FR3 | Covariance violator | V | G, A |
| 79 | FR3 | Covariance violator | Q | E, D |
| 80 | FR3 | Covariance violator | S | P, A |
| 85 | FR3 | Covariance violator | F | V, L, A, D, I, |
| | | | | L, M, T |
| 94 | CDR3 | Potential Tryptophan | W | F, Y, S, T, A, |
| | | Oxidation Site | | H, I, Q |
| 100 | FR4 | Covariance violator | P | R, Q, G |

Heavy chain variable sequence (SEQ ID NO: 117)

| | | | | |
|---|---|---|---|---|
| 19 | FR1 | Covariance violator | M | K, R, T, E, N, |
| | | | | Q |
| 55-56 | CDR2 | Potential | DS | ES, QS, DA, |
| | | Isomerization Site | | NS, DQ, TS, |
| | | | | DV |
| 57-58 | CDR2 | Potential | DT | ST, ET, DA, |
| | | Isomerization Site | | DV, QT |
| 104 | CDR3 | Potential Tryptophan | W | F, Y, T, S, A, |
| | | Oxidation Site | | H, I, Q |

TABLE 2B
Engineered Variants of 13E7 Antibody

| | | | | |
|---|---|---|---|---|
| Position in | | | | |
| 13E7 VL | | | Parent | |
| Sequence or | | | Amino | Amino Acid |
| VH sequence | Region | Hot Spot | Acid | Substitutions |

Light chain variable sequence (SEQ ID NO: 55)

| | | | | |
|---|---|---|---|---|
| 64 | FR3 | Covariance violator | V | G, A |
| 79 | FR3 | Covariance violator | Q | E, D |
| 80 | FR3 | Covariance violator | S | P, A |
| 94 | CDR3 | Potential Tryptophan | W | F, Y, S, T, A, |
| | | Oxidation Site | | H, I, Q |
| 100 | FR4 | Covariance violator | P | R, Q, G |

Heavy chain variable sequence (SEQ ID NO: 118)

| | | | | |
|---|---|---|---|---|
| 19 | FR1 | Covariance violator | M | K, R, T, E, N, |
| | | | | Q |
| 55-56 | CDR2 | Potential | DS | ES, QS, DA, |
| | | Isomerization Site | | DQ, NS, TS, |
| | | | | DV |
| 57-58 | CDR2 | Potential | DT | ST, ET, DA, |
| | | Isomerization Site | | DV, QT |
| 104 | CDR3 | Potential Tryptophan | W | F, Y, T, S, A, |
| | | Oxidation Site | | H, I, Q |

TABLE 2C
Engineered Variants of 4C5 Antibody

| | | | | |
|---|---|---|---|---|
| Position in | | | | |
| 4C5 VL | | | Parent | |
| Sequence or | | | Amino | Amino Acid |
| VH sequence | Region | Hot Spot | Acid | Substitutions |

Light chain variable sequence (SEQ ID NO: 60)

| | | | | |
|---|---|---|---|---|
| 60 | FR3 | Covariance violator | L | S, P, D, A |
| 92-93 | CDR3 | Potential | DS | ES, QS, DA, |
| | | Isomerization Site | | DN, DQ, TS, |
| | | | | NS, DV |

Heavy chain variable sequence (SEQ ID NO: 123)

| | | | | |
|---|---|---|---|---|
| 27 | FR1 | Covariance violator | H | Y, D, F, N |
| 55-56 | CDR2 | Potential | DS | ES, QS, DA, |
| | | Isomerization Site | | DQ, DV, TS, |
| | | | | NS |
| 57-58 | CDR2 | Potential | DT | ST, ET, DA, |
| | | Isomerization Site | | DV, QT |
| 105-106 | CDR3 | Potential | DS | ES, QS, DA, |
| | | Isomerization Site | | DQ, DV, TS, |
| | | | | NS, GT |

TABLE 2D
Engineered Variants of 6E7 Antibody

| | | | | |
|---|---|---|---|---|
| Position in | | | | |
| 6E7 VL | | | Parent | |
| Sequence or | | | Amino | Amino Acid |
| VH sequence | Region | Hot Spot | Acid | Substitutions |

Light chain variable sequence (SEQ ID NO: 61)

| | | | | |
|---|---|---|---|---|
| 56-57 | CDR2/FR3 | Potential | NG | SG, TG, QG, |
| | boundary | Deamidation Site | | NA, EG, NV |
| 92-93 | CDR3 | Potential | DS | ES, QS, DA, |
| | | Isomerization Site | | DN, DQ, DV, |
| | | | | TS, NS |

Heavy chain variable sequence (SEQ ID NO: 124)

| | | | | |
|---|---|---|---|---|
| 55-56 | CDR2 | Potential | DS | ES, QS, DA, |
| | | Isomerization Site | | DQ, DV, TS, |
| | | | | NS |
| 57-58 | CDR2 | Potential | DT | ST, ET, DA, |
| | | Isomerization Site | | DV, QT |
| 105-106 | CDR3 | Potential | DS | ES, QS, DA, |
| | | Isomerization Site | | DQ, DV, TS, |
| | | | | NS, GT |

TABLE 2E
Engineered Variants of 5E3 Antibody

| | | | | |
|---|---|---|---|---|
| Position in | | | | |
| 5E3 VL | | | Parent | |
| Sequence or | | | Amino | Amino Acid |
| VH sequence | Region | Hot Spot | Acid | Substitutions |

Light chain variable sequence (SEQ ID NO: 62)

| | | | | |
|---|---|---|---|---|
| 36 | FR2 | Consensus violator | F | Y |
| 46 | FR2 | Covariance violator | S | L, R, V, F |
| 61 | FR3 | Consensus violator | K | R |
| 100 | FR4 | Covariance violator | P | Q, G, R |

Heavy chain variable sequence (SEQ ID NO: 125)

| | | | | |
|---|---|---|---|---|
| 43 | FR2 | Covariance violator | L | Q, K, H |
| 76 | FR3 | Covariance violator | I | T |
| 85 | FR3 | Covariance violator | R | S, G, N, D |
| 99-100 | CDR3 | Potential | DG | EG, DA, DY, |
| | | Isomerization Site | | DV, QG, SG, |
| | | | | TG |
| 116 | FR4 | Covariance violator | T | L, M, P, R |

TABLE 2F
Engineered Variants of 24G6 Antibody

| | | | | |
|---|---|---|---|---|
| Position in | | | | |
| 24G6 VL | | | Parent | |
| Sequence or | | | Amino | Amino Acid |
| VH sequence | Region | Hot Spot | Acid | Substitutions |

Light chain variable sequence (SEQ ID NO: 52)

| | | | | |
|---|---|---|---|---|
| 91 | FR3 | Covariance violator | F | V, I, T, L, D |

Heavy chain variable sequence (SEQ ID NO: 115)

| | | | | |
|---|---|---|---|---|
| 62-63 | CDR2 | Potential | DS | ES, QS, DA, |
| | | Isomerization Site | | DQ, TS, DV, |
| | | | | NS |

[0194] In some embodiments, the TREM2 agonist antigen binding proteins comprise one or more CDRs of a variant of the anti-TREM2 antibodies described herein. In some embodiments, the TREM2 agonist antigen binding proteins may comprise one or more CDRs of the anti-TREM2 antibody variants set forth in Tables 3A, 3B, 3C, 3D, and 3E, below.

[0195] In certain embodiments, the TREM2 agonist antigen binding proteins of the invention comprise a light chain variable region and/or heavy chain variable region from an affinity-modulated variant of the 6E7 antibody. For instance, in some embodiments, the TREM2 agonist antigen binding proteins comprise a light chain variable region and/or a heavy chain variable region having one or more of the amino acid substitutions set forth in Table 2G.

TABLE 2G
6E7 Antibody Affinity Modulation Variants

| | Substitutions with | | | | | | Binding Signal (fold over | | | |
|---|---|---|---|---|---|---|---|---|---|---|
| | respect to 6E7 VH sequence | | | Substitutions with | | | 6E7 parental antibody) | | | |
| | (SEQ ID NO: 124) | | | respect to 6E7 VL sequence | | | 1^{st} | | | |
| | HC | | | (SEQ ID NO: 61) | | | screen | 2^{nd} | 2^{nd} | 2^{nd} |
| Variant | FR1- | HC | HC | LC | LC | LC | 110 nM | screen | screen | screen |
| Ab ID | CDR1 | CDR2 | CDR3 | CDR1 | CDR2 | CDR3 | or 10 nM^{a} | 2 nM | 10 nM | 100 nM |
| V1 | Y32S | | Q99S | | Q55T | F94Y | 1.68 | 1.29 | 1.92 | |
| V2 | Y27S | S56G | Q99S | | L54R | S93R | 2.55 | 2.23 | 2.90 | |
| V3 | T30A | G66D | Q99G | | L54R | S93R | 1.97 | 1.95 | 2.24 | |
| V4 | T30G | Y60V | Q99S | | S53R | F94Y | 6.00 | 5.88 | 5.51 | |
| V5 | | I50T | | | | F94H | 2.73 | 1.25 | 2.84 | |
| V6 | Y32M | | | | | | 0.20* | | | 0.56 |
| V7 | Y32E | | | | | | 0.11* | | | 0.32 |
| V8 | | R59K | | | | | 0.28* | | | 0.77 |
| V9 | | | T101G | | | | 0.67* | | | 0.54 |
| V10 | | | | | A50S | | 0.76* | | | 0.70 |
| V11 | | | | | | D92A | 0.79* | | | 0.42 |
| V12 | S28E | T58V | Q99G | | N56R | | 2.29 | 1.04 | 2.58 | |
| V13 | T30G | P62A | Q99G | | N56G | F94M | 1.31 | 1.15 | 1.35 | |
| V14 | T30G | S56Q | Q99G | | S53R | | 4.71 | 2.57 | 4.64 | |
| V15 | T30A | I50T | Q99S | | S53W | F94Y | 5.23 | 4.72 | 4.78 | |
| V16 | F29M | S56G | Q99S | | S53N | | 4.01 | 3.57 | 4.04 | |
| V17 | T30G | | Q99S | | L54R | F94S | 5.37 | 4.22 | 5.51 | |
| V18 | W33H | | | | | | 0.17* | | | 0.42 |
| V19 | Y32S | | | | | | 0.59* | | | 0.48 |
| V20 | | I50R | | | | | 0.18* | | | 0.52 |
| V21 | | | Y109F | | | | 0.76* | | | 0.68 |
| V22 | | | | | A50R | | 0.30* | | | 0.71 |
| V23 | | | | | | R96L | 0.40* | | | 0.40 |
| V24 | | T58V | Q99S | | N56K | R96H | 2.64 | 1.42 | 2.90 | |
| V25 | T30G | I50L | Q99S | | Q55A | F94M | 4.23 | 3.15 | 4.70 | |
| V26 | A35G | I50T | F102M, | | N56R | F94Y | 3.57 | 2.83 | 3.47 | |
| | | | Y112A | | | | | | | |
| V27 | | S61A | Q99S | | N56R | | 5.50 | 5.67 | 5.69 | |
| V28 | T30Q | I50T | Y103F | | N56S | F94L | 3.08 | 2.63 | 3.61 | |
| V29 | T30K | | | | | | 1.53 | 0.84 | 1.67 | |
| V30 | Y27S | | | | | | 0.79* | | | 0.72 |
| V31 | | D57E | | | | | 0.61* | | | 0.73 |
| V32 | | P62N | | | | | 0.82* | | | 0.89 |
| V33 | | | Y104G | | | | 0.23* | | | 0.34 |
| V34 | | | | | N56D | | 0.34* | | | 1.02 |
| V35 | | | | | | D92Y | 0.21* | | | 0.29 |
| V36 | I34L | | Q99S | | L54R | F94Y | 3.38 | 4.00 | 3.44 | |
| V37 | F29H | Q65A | Q99S | | N56W | F94Y | 3.46 | 3.69 | 3.49 | |
| V38 | T30G | T58V | | | L54R | F94H | 4.34 | 3.44 | 4.36 | |
| V39 | T30G | S61N | Q99G | | Q55V | F94S | 6.15 | 5.11 | 5.81 | |
| V40 | T30G | T58V | F110S | | N56L | S93R | 4.48 | 3.41 | 4.16 | |
| V41 | | I50T | | | | | 1.74 | 0.58 | 1.72 | |
| V42 | Y32A | | | | | | 0.45* | | | 0.41 |
| V43 | | D57G | | | | | 0.20* | | | 0.33 |
| V44 | | G54S | | | | | 0.65* | | | 0.52 |
| V45 | | | | W32F | | | 0.43* | | | 0.53 |
| V46 | | | | | S53T | | 0.83* | | | 0.96 |
| V47 | | | | | | R96M | 0.42* | | | 0.47 |
| V48 | T30G | T58V | Q99M | | N56T | F94L | 2.42 | 2.30 | 2.54 | |
| V49 | T30N | I50T, | Q99S | | L54R | F94Y | 6.51 | 5.02 | 6.58 | |
| | | Y60L | | | | | | | | |
| V50 | T30G | I50V | F110L | | L54R | F94L | 4.10 | 3.39 | 4.16 | |
| V51 | | T58V | Q99G, | | L54R | | 2.81 | 1.83 | 3.18 | |
| | | | Y112N | | | | | | | |
| V52 | T30E | | Q99G | | N56R | S93R | 3.00 | 1.78 | 3.09 | |
| V53 | | S63H | | | | | 1.25 | 0.66 | 1.17 | |
| V54 | Y32Q | | | | | | 0.55* | | | 0.54 |
| V55 | | R59I, | | | | | 0.24* | | | 0.66 |
| | | F64H | | | | | | | | |
| V56 | | S61Q | | | | | 0.23* | | | 0.59 |
| V57 | | | | R24A | | | 0.84* | | | 0.85 |
| V58 | | | | | A50K | | 0.28* | | | 0.68 |
| V59 | | | | | | Q89M | 0.19* | | | 0.60 |
| V60 | S28H | T58V | F110S | | N56R | Q89G | 3.26 | 3.35 | 3.63 | |
| V61 | T30S | S61N | Q99G | | Q55V | F94L | 5.08 | 3.63 | 5.22 | |
| V62 | T30G | S61A | D108G | | N56R | Q89G | 2.49 | 1.87 | 2.89 | |
| V63 | T30R | | Q99S | | N56R | S93R | 3.76 | 4.91 | 3.71 | |
| V64 | T30Q | | Q99G | | Q55A | F94Y | 5.41 | 4.88 | 5.48 | |
| V65 | | | Q99S | | | | 2.05 | 1.29 | 2.75 | |
| V66 | Y27T | | | | | | 0.25* | | | 0.74 |
| V67 | | I50M | | | | | 0.80* | | | 0.84 |
| V68 | | | Y103R | | | | 0.44* | | | 0.43 |
| V69 | | | | W32Y | | | 0.41* | | | 0.40 |
| V70 | | | | | S52G | | 0.79* | | | 0.84 |
| V71 | | | | | | F94E | 0.37* | | | 0.48 |
| V72 | A35G | | Q99G | | Q55V | F94Y | 3.64 | 2.50 | 4.01 | |
| V73 | T30G | S63G | Q99G | | L54R | F94Y | 5.12 | 4.17 | 5.44 | |
| V74 | T30A | T58V | Q99G | | N56L | | 3.94 | 2.54 | 4.01 | |
| V75 | | | Q99G | | N56A | F94Y | 4.64 | 3.74 | 4.52 | |
| V76 | T30G | S63E | F110S | | N56K | | 4.57 | 4.34 | 4.93 | |
| V77 | | | | | L54R | | 1.43 | 0.83 | 1.38 | |
| V78 | S28R | | | | | | 0.86* | | | 1.11 |
| V79 | | R59N | | | | | 0.70* | | | 0.52 |
| V80 | | | T101N | | | | 0.59* | | | 0.50 |
| V81 | | | | W32L | | | 0.17* | | | 0.23 |
| V82 | | | | | A51G | | 0.30* | | | 0.79 |
| V83 | | | | | | D92V | 0.20* | | | 0.29 |
| V84 | S28G | | F110S | | A50G | | 1.44 | 1.45 | 1.62 | |
| V85 | T30R | I50T | Q99S | | L54R | | 5.41 | 5.41 | 5.37 | |
| V86 | T30G, | Q65E | Q99S | | L54R | | 4.80 | 5.17 | 5.02 | |
| | I34L | | | | | | | | | |
| V87 | T30R | T58V, | Q99S | | N56W | | 3.84 | 4.86 | 3.93 | |
| | | S63D | | | | | | | | |
| V88 | T30G | | | | S53R, | F94S | 4.92 | 5.57 | 5.30 | |
| | | | | | N56R | | | | | |
| V89 | | | | | | F94H | 1.33 | 0.94 | 1.46 | |
| V90 | Y32E | | | S31R | | | 0.33* | | | 0.36 |
| V91 | | G54D | | | | | 0.25* | | | 0.61 |
| V92 | | | Y103H | | | | 0.22* | | | 0.65 |
| V93 | | | | S31G | | | 0.35* | | | 1.05 |
| V94 | | | | | S52A | | 0.31* | | | 0.87 |

Binding signal values marked with an * were obtained with the 110 nM Ab concentration, whereas the remaining values in the column were obtained with the 10 nM Ab concentration

[0196] In some embodiments, the TREM2 agonist antigen binding protein comprises a light chain variable region comprising the sequence of SEQ ID NO: 61 with a mutation at one or more amino acid positions 24, 31, 50, 52, 54, 56, 89, 92, 93, 94 and/or 96. In certain embodiments, the mutation is selected from R24A, S31R, A50S, A50G, S52G, L54R, N56K, N56R, N56L, N56T, Q89G, D92V, S93R, F94Y, F94L, R96H, R96L, or combinations thereof. In these and other embodiments, the TREM2 agonist antigen binding protein comprises a heavy chain variable region comprising the sequence of SEQ ID NO: 124 with a mutation at one or more amino acid positions 27, 28, 30, 32, 50, 54, 58, 60, 61, 63, 66, 99, 101, 103, 104, and/or 110. In some embodiments, the mutation is selected from Y27S, S28G, S28H, T30N, T30G, T30E, T30A, Y32E, I50T, G54S, T58V, Y60L, S61A, S63G, S63E, G66D, Q99G, Q99S, Q99M, T101G, Y103R, Y104G, F110S, or combinations thereof. Amino acid sequences for light chain and heavy chain variable regions and associated CDRs of exemplary variants of the 6E7 antibody with improved affinity are set forth below in Tables 3A and 3B, respectively. Amino acid sequences for light chain and heavy chain variable regions and associated CDRs of exemplary variants of the 6E7 antibody with reduced affinity are set forth below in Tables 3C and 3D, respectively. The corresponding sequences for the 6E7 antibody are listed for comparison.

TABLE 3A
Light Chain Variable Region Amino Acid Sequences for Improved Affinity
TREM2 Antibodies

| Variant | VL | VL Amino Acid | | | |
|---|---|---|---|---|---|
| Ab ID. | Group | Sequence | CDRL1 | CDRL2 | CDRL3 |
| 6E7 | LV-16 | DIQMTQSPSSVSASVGDR | RASQGISSWL | AASSLQN | QQADSFPRT |
| | | VTITCRASQGISSWLAWY | A (SEQ ID | (SEQ ID | (SEQ ID NO: |
| | | QQKPGKAPKLLIYAASSL | NO: 16) | NO: 28) | 43) |
| | | QNGVPSRFSGSGSGTDFT | | | |
| | | LTISSLQPEDFATYFCQQ | | | |
| | | ADSFPRTFGQGTKLEIK | | | |
| | | (SEQ ID NO: 61) | | | |
| V3 | LV- | DIQMTQSPSSVSASVGDR | RASQGISSWL | AASSRQN | QQADRFPRT |
| | 101 | VTITCRASQGISSWLAWY | A | (SEQ ID | (SEQ ID NO: |
| | | QQKPGKAPKLLIYAASSR | (SEQ ID | NO: 143) | 148) |
| | | QNGVPSRFSGSGSGTDFT | NO: 16) | | |
| | | LTISSLQPEDFATYFCQQ | | | |
| | | ADRFPRTFGQGTKLEIK | | | |
| | | (SEQ ID NO: 153) | | | |
| V24 | LV- | DIQMTQSPSSVSASVGDR | RASQGISSWL | AASSLQK | QQADSFPHT |
| | 102 | VTITCRASQGISSWLAWY | A | (SEQ ID | (SEQ ID NO: |
| | | QQKPGKAPKLLIYAASSL | (SEQ ID | NO: 144) | 149) |
| | | QKGVPSRFSGSGSGTDFT | NO: 16) | | |
| | | LTISSLQPEDFATYFCQQ | | | |
| | | ADSFPHTFGQGTKLEIK | | | |
| | | (SEQ ID NO: 154) | | | |
| V27 | LV- | DIQMTQSPSSVSASVGDR | RASQGISSWL | AASSLQR | QQADSFPRT |
| | 103 | VTITCRASQGISSWLAWY | A | (SEQ ID | (SEQ ID NO: |
| | | QQKPGKAPKLLIYAASSL | (SEQ ID | NO: 145) | 43) |
| | | QRGVPSRFSGSGSGTDFT | NO: 16) | | |
| | | LTISSLQPEDFATYFCQQ | | | |
| | | ADSFPRTFGQGTKLEIK | | | |
| | | (SEQ ID NO: 155) | | | |
| V40 | LV- | DIQMTQSPSSVSASVGDR | RASQGISSWL | AASSLQL | QQADRFPRT |
| | 104 | VTITCRASQGISSWLAWY | A | (SEQ ID | (SEQ ID NO: |
| | | QQKPGKAPKLLIYAASSL | (SEQ ID | NO: 146) | 148) |
| | | QLGVPSRFSGSGSGTDFT | NO: 16) | | |
| | | LTISSLQPEDFATYFCQQ | | | |
| | | ADRFPRTFGQGTKLEIK | | | |
| | | (SEQ ID NO: 156) | | | |
| V48 | LV- | DIQMTQSPSSVSASVGDR | RASQGISSWL | AASSLQT | QQADSLPRT |
| | 105 | VTITCRASQGISSWLAWY | A | (SEQ ID | (SEQ ID NO: |
| | | QQKPGKAPKLLIYAASSL | (SEQ ID | NO: 26) | 150) |
| | | QTGVPSRFSGSGSGTDFT | NO: 16) | | |
| | | LTISSLQPEDFATYFCQQ | | | |
| | | ADSLPRTFGQGTKLEIK | | | |
| | | (SEQ ID NO: 157) | | | |
| V49 | LV- | DIQMTQSPSSVSASVGDR | RASQGISSWL | AASSRQN | QQADSYPRT |
| V73 | 106 | VTITCRASQGISSWLAWY | A | (SEQ ID | (SEQ ID NO: |
| | | QQKPGKAPKLLIYAASSR | (SEQ ID | NO: 143) | 151) |
| | | QNGVPSRFSGSGSGTDFT | NO: 16) | | |
| | | LTISSLQPEDFATYFCQQ | | | |
| | | ADSYPRTFGQGTKLEIK | | | |
| | | (SEQ ID NO: 158) | | | |
| V52 | LV- | DIQMTQSPSSVSASVGDR | RASQGISSWL | AASSLQR | QQADRFPRT |
| | 107 | VTITCRASQGISSWLAWY | A | (SEQ ID | (SEQ ID NO: |
| | | QQKPGKAPKLLIYAASSL | (SEQ ID | NO: 145) | 148) |
| | | QRGVPSRFSGSGSGTDFT | NO: 16) | | |
| | | LTISSLQPEDFATYFCQQ | | | |
| | | ADRFPRTFGQGTKLEIK | | | |
| | | (SEQ ID NO: 159) | | | |
| V60 | LV- | DIQMTQSPSSVSASVGDR | RASQGISSWL | AASSLQR | GQADSFPRT |
| | 108 | VTITCRASQGISSWLAWY | A | (SEQ ID | (SEQ ID NO: |
| | | QQKPGKAPKLLIYAASSL | (SEQ ID | NO: 145) | 152) |
| | | QRGVPSRFSGSGSGTDFT | NO: 16) | | |
| | | LTISSLQPEDFATYFCGQ | | | |
| | | ADSFPRTFGQGTKLEIK | | | |
| | | (SEQ ID NO: 160) | | | |
| V76 | LV- | DIQMTQSPSSVSASVGDR | RASQGISSWL | AASSLQK | QQADSFPRT |
| | 109 | VTITCRASQGISSWLAWY | A | (SEQ ID | (SEQ ID NO: |
| | | QQKPGKAPKLLIYAASSL | (SEQ ID | NO: 144) | 43) |
| | | QKGVPSRFSGSGSGRDFT | NO: 16) | | |
| | | LTISSLQPEDFATYFCQQ | | | |
| | | ADSFPRTFGQGTKLEIK | | | |
| | | (SEQ ID NO: 161) | | | |
| V84 | LV- | DIQMTQSPSSVSASVGDR | RASQGISSWL | GASSLQN | QQADSFPRT |
| | 110 | VTITCRASQGISSWLAWY | A | (SEQ ID | (SEQ ID NO: |
| | | QQKPGKAPKLLIYGASSL | (SEQ ID | NO: 147) | 43) |
| | | QNGVPSRFSGSGSGTDFT | NO: 16) | | |
| | | LTISSLQPEDFATYFCQQ | | | |
| | | ADSFPRTFGQGTKLEIK | | | |
| | | (SEQ ID NO: 162) | | | |

TABLE 3B
Heavy Chain Variable Region Amino Acid Sequences for Improved Affinity
TREM2 Antibodies

| | | VH Amino | FR1/ | | | |
|---|---|---|---|---|---|---|
| Variant | VH | Acid | CDRH1 | | | |
| Ab ID. | Group | Sequence | Border | CDRH1 | CDRH2 | CDRH3 |
| 6E7 | HV- | EVQLVQSGAEV | YSFT | SYWIA | IIYPGDSDTRY | QRTFYYDSSDYFDY |
| | 15 | KKPGESLKISC | (SEQ ID | (SEQ ID | SPSFQG (SEQ | (SEQ ID NO: |
| | | KGSGYSFTSYW | NO: | NO: 85) | ID NO: 91) | 107) |
| | | IAWVRQMPGKG | 163) | | | |
| | | LEWMGIIYPGD | | | | |
| | | SDTRYSPSFQG | | | | |
| | | QVTISADKSIS | | | | |
| | | TAYLQWSSLKA | | | | |
| | | SDTAMYFCARQ | | | | |
| | | RTFYYDSSDYF | | | | |
| | | DYWGQGTLVTV | | | | |
| | | SS | | | | |
| | | (SEQ ID NO: | | | | |
| | | 124) | | | | |
| V3 | HV- | EVQLVQSGAEV | YSFA | SYWIA | IIYPGDSDTRY | GRTFYYDSSDYFDY |
| | 101 | KKPGESLKISC | (SEQ ID | (SEQ ID | SPSFQD (SEQ | (SEQ ID NO: |
| | | KGSGYSFASYW | NO: | NO: 85) | ID NO: 170) | 176) |
| | | IAWVRQMPGKG | 164) | | | |
| | | LEWMGIIYPGD | | | | |
| | | SDTRYSPSFQD | | | | |
| | | QVTISADKSIS | | | | |
| | | TAYLQWSSLKA | | | | |
| | | SDTAMYFCARG | | | | |
| | | RTFYYDSSDYF | | | | |
| | | DYWGQGTLVTV | | | | |
| | | SS | | | | |
| | | (SEQ ID NO: | | | | |
| | | 180) | | | | |
| V24 | HV- | EVQLVQSGAEV | YSFT | SYWIA | IIYPGDSDVRY | SRTFYYDSSDYFDY |
| | 102 | KKPGESLKISC | (SEQ ID | (SEQ ID | SPSFQG (SEQ | (SEQ ID NO: |
| | | KGSGYSFTSYW | NO: | NO: 85) | ID NO: 171) | 177) |
| | | IAWVRQMPGKG | 163) | | | |
| | | LEWMGIIYPGD | | | | |
| | | SDVRYSPSFQG | | | | |
| | | QVTISADKSIS | | | | |
| | | TAYLQWSSLKA | | | | |
| | | SDTAMYFCARS | | | | |
| | | RTFYYDSSDYF | | | | |
| | | DYWGQGTLVTV | | | | |
| | | SS | | | | |
| | | (SEQ ID NO: | | | | |
| | | 181) | | | | |
| V27 | HV- | EVQLVQSGAEV | YSFT | SYWIA | IIYPGDSDTRY | SRTFYYDSSDYFDY |
| | 103 | KKPGESLKISC | (SEQ ID | (SEQ ID | APSFQG (SEQ | (SEQ ID NO: |
| | | KGSGYSFTSYW | NO: | NO: 85) | ID NO: 172) | 177) |
| | | IAWVRQMPGKG | 163) | | | |
| | | LEWMGIIYPGD | | | | |
| | | SDTRYAPSFQG | | | | |
| | | QVTISADKSIS | | | | |
| | | TAYLQWSSLKA | | | | |
| | | SDTAMYFCVRS | | | | |
| | | RTFYYDSSDYF | | | | |
| | | DYWGQGTLVTV | | | | |
| | | SS | | | | |
| | | (SEQ ID NO: | | | | |
| | | 182) | | | | |
| V40 | HV- | EVQLVQSGAEV | YSFG | SYWIA | IIYPGDSDVRY | QRTFYYDSSDYSDY |
| | 104 | KKPGESLKISC | (SEQ ID | (SEQ ID | SPSFQG | (SEQ ID NO: |
| | | KGSGYSFGSYW | NO: | NO: 85) | (SEQ ID NO: | 178) |
| | | IAWVRQMPGKG | 165) | | 171) | |
| | | LEWMGIIYPGD | | | | |
| | | SDVRYSPSFQG | | | | |
| | | QVTISADKSIS | | | | |
| | | TAYLQWSSLKA | | | | |
| | | SDTAMYFCARQ | | | | |
| | | RTFYYDSSDYS | | | | |
| | | DYWGQGTLVTV | | | | |
| | | SS | | | | |
| | | (SEQ ID NO: | | | | |
| | | 183) | | | | |
| V48 | HV- | EVQLVQSGAEV | YSFG | SYWIA | IIYPGDSDVRY | MRTFYYDSSDYFDY |
| | 105 | KKPGESLKISC | (SEQ ID | (SEQ ID | SPSFQG | (SEQ ID NO: |
| | | KGSGYSFGSYW | NO: | NO: 85) | (SEQ ID NO: | 179) |
| | | IAWVRQMPGKG | 165) | | 171) | |
| | | LEWMGIIYPGD | | | | |
| | | SDVRYSPSFQG | | | | |
| | | QVTISADKSIS | | | | |
| | | TAYLQWSSLKA | | | | |
| | | SDTAMYFCARM | | | | |
| | | RTFYYDSSDYF | | | | |
| | | DYWGQGTLVTV | | | | |
| | | SS | | | | |
| | | (SEQ ID NO: | | | | |
| | | 184) | | | | |
| V49 | HV- | EVQLVQSGAEV | YSFN | SYWIA | TIYPGDSDTRL | SRTFYYDSSDYFDY |
| | 106 | KKPGESLKISC | (SEQ ID | (SEQ ID | SPSFQG (SEQ | (SEQ ID NO: |
| | | KGSGYSFNSYW | NO: | NO: 85) | ID NO: 173) | 177) |
| | | IAWVRQMPGKG | 166) | | | |
| | | LEWMGTIYPGD | | | | |
| | | SDTRLSPSFQG | | | | |
| | | QVTISADKSIS | | | | |
| | | TAYLQWSSLKA | | | | |
| | | SDTAMYFCARS | | | | |
| | | RTFYYDSSDYF | | | | |
| | | DYWGQGTLVTV | | | | |
| | | SS | | | | |
| | | (SEQ ID NO: | | | | |
| | | 185) | | | | |
| V52 | HV- | EVQLVQSGAEV | YSFE | SYWIA | IIYPGDSDTRY | GRTFYYDSSDYFDY |
| | 107 | KKPGESLKISC | (SEQ ID | (SEQ ID | SPSFQG | (SEQ ID NO: |
| | | KGSGYSFESYW | NO: | NO: 85) | (SEQ ID NO: | 176) |
| | | IAWVRQMPGKG | 167) | | 91) | |
| | | LEWMGIIYPGD | | | | |
| | | SDTRYSPSFQG | | | | |
| | | QVTISADKSIS | | | | |
| | | TAYLQWSSLKA | | | | |
| | | SDTAMYFCARG | | | | |
| | | RTFYYDSSDYF | | | | |
| | | DYWGQGTLVTV | | | | |
| | | SS | | | | |
| | | (SEQ ID NO: | | | | |
| | | 186) | | | | |
| V60 | HV- | EVQLVQSGAEV | YHFT | SYWIA | IIYPGDSDVRY | QRTFYYDSSDYSDY |
| | 108 | KKPGESLKISC | (SEQ ID | (SEQ ID | SPSFQG | (SEQ ID NO: |
| | | KGSGYHFTSYW | NO: | NO: 85) | (SEQ ID NO: | 178) |
| | | IAWVRQMPGKG | 168) | | 171) | |
| | | LEWMGIIYPGD | | | | |
| | | SDVRYSPSFQG | | | | |
| | | QVTISADKSIS | | | | |
| | | TAYLQWSSLKA | | | | |
| | | SDTAMYFCARQ | | | | |
| | | RTFYYDSSDYS | | | | |
| | | DYWGQGTLVTV | | | | |
| | | SS | | | | |
| | | (SEQ ID NO: | | | | |
| | | 187) | | | | |
| V73 | HV- | EVQLVQSGAEV | YSFG | SYWIA | IIYPGDSDTRY | GRTFYYDSSDYFDY |
| | 109 | KKPGESLKISC | (SEQ ID | (SEQ ID | SPGFQG (SEQ | (SEQ ID NO: |
| | | KGSGYSFGSYW | NO: | NO: 85) | ID NO: 174) | 176) |
| | | IAWVRQMPGKG | 165) | | | |
| | | LEWMGIIYPGD | | | | |
| | | SDTRYSPGFQG | | | | |
| | | QVTISADKSIS | | | | |
| | | TAYLQWSSLKA | | | | |
| | | SDTAMYFCARG | | | | |
| | | RTFYYDSSDYF | | | | |
| | | DYWGQGTLVTV | | | | |
| | | SS | | | | |
| | | (SEQ ID NO: | | | | |
| | | 188) | | | | |
| V76 | HV- | EVQLVQSGAEV | YSFG | SYWIA | IIYPGDSDTRY | QRTFYYDSSDYSDY |
| | 110 | KKPGESLKISC | (SEQ ID | (SEQ ID | SPEFQG (SEQ | (SEQ ID NO: |
| | | KGSGYSFGSYW | NO: | NO: 85) | ID NO: 175) | 178) |
| | | IAWVRQMPGKG | 165) | | | |
| | | LEWMGIIYPGD | | | | |
| | | SDTRYSPEFQG | | | | |
| | | QVTISADKSIS | | | | |
| | | TAYLQWSSLKA | | | | |
| | | SDTAMYFCARQ | | | | |
| | | RTFYYDSSDYS | | | | |
| | | DYWGQGTLVTV | | | | |
| | | SS | | | | |
| | | (SEQ ID NO: | | | | |
| | | 189) | | | | |
| V84 | HV- | EVQLVQSGAEV | YGFT | SYWIA | IIYPGDSDTRY | QRTFYYDSSDYSDY |
| | 111 | KKPGESLKISC | (SEQ ID | (SEQ ID | SPSFQG | (SEQ ID NO: |
| | | KGSGYGFTSYW | NO: | NO: 85) | (SEQ ID NO: | 178) |
| | | IAWVRQMPGKG | 169) | | 91) | |
| | | LEWMGIIYPGD | | | | |
| | | SDTRYSPSFQG | | | | |
| | | QVTISADKSIS | | | | |
| | | TAYLQWSSLKA | | | | |
| | | SDTAMYFCARQ | | | | |
| | | RTFYYDSSDYS | | | | |
| | | DYWGQGTLVTV | | | | |
| | | SS | | | | |
| | | (SEQ ID NO: | | | | |
| | | 190) | | | | |

[0197] In some embodiments, the TREM2 agonist antigen binding proteins of the invention may comprise one or more of the CDRs from the improved affinity variants presented in Table 3A (light chain CDRs; i.e. CDRLs) and Table 3B (heavy chain CDRs, i.e. CDRHs). In some embodiments, the TREM2 agonist antigen binding proteins comprise a consensus CDR sequence derived from the improved affinity variants. For instance, in some embodiments, the TREM2 agonist antigen binding proteins comprise a CDRL2 consensus sequence of X₁ASSX₂QX₃ (SEQ ID NO: 139), where X₁ is A or G; X₂ is L or R; and X₃ is N, K, R, L, or T. In another embodiment, the TREM2 agonist antigen binding proteins comprise a CDRL3 consensus sequence of X₁QADX₂X₃PX₄T (SEQ TD NO: 140), where X₁ is Q or G; X₂ is S or R; X₃ is F, L, or Y; and X₄ is R or H. In yet another embodiment, the TREM2 agonist antigen binding proteins comprise a CDRH2 consensus sequence of X₁YPGDSDX₂RX₃X₄PX₅FQX₆ (SEQ TD NO: 141), where X₁ is I or T; X₂ is T or V; X₃ is Y or L; X₄ is S or A; X₅ is S, G, or E; and X₆ is G or D. In some embodiments, the TREM2 agonist antigen binding proteins comprise a CDRH3 consensus sequence of X₁RTFYYDSSDYX₂DY (SEQ ID NO: 142), where X₁ is Q, G, S, or M; and X₂ is F or S.

[0198] In some embodiments, the TREM2 agonist antigen binding proteins comprise a light chain variable region comprising complementarity determining regions CDRL1, CDRL2, and CDRL3 and a heavy chain variable region comprising complementarity determining regions CDRH1, CDRH2, and CDRH3, wherein CDRL1 comprises the sequence of SEQ ID NO: 16, CDRL2 comprises the consensus sequence of SEQ ID NO: 139, CDRL3 comprises the consensus sequence of SEQ ID NO: 140, CDRH1 comprises the sequence of SEQ ID NO: 85, CDRH2 comprises the consensus sequence of SEQ ID NO: 141, and CDRH3 comprises the consensus sequence of SEQ ID NO: 142.

[0199] In some embodiments, the TREM2 agonist antigen binding protein comprises a CDRL1 comprising the sequence of SEQ ID NO: 16; a CDRL2 comprising a sequence selected from SEQ ID NOs: 26 and 143-147; a CDRL3 comprising a sequence selected from SEQ ID NOs: 43 and 148-152; a CDRH1 comprising the sequence of SEQ ID NO: 85; a CDRH2 comprising a sequence selected from SEQ ID NOs: 91 and 170-175; and a CDRH3 comprising a sequence selected from SEQ ID NOs: 176-179.

[0200] In particular embodiments, the TREM2 agonist antigen binding proteins of the invention comprise a light chain variable region comprising a CDRL1, a CDRL2, and a CDRL3, wherein:
[0201] (a) CDRL1, CDRL2, and CDRL3 have the sequence of SEQ ID NOs: 16, 143, and 148, respectively;
[0202] (b) CDRL1, CDRL2, and CDRL3 have the sequence of SEQ ID NOs: 16, 144, and 149, respectively;
[0203] (c) CDRL1, CDRL2, and CDRL3 have the sequence of SEQ ID NOs: 16, 145, and 43, respectively;
[0204] (d) CDRL1, CDRL2, and CDRL3 have the sequence of SEQ ID NOs: 16, 146, and 148, respectively;
[0205] (e) CDRL1, CDRL2, and CDRL3 have the sequence of SEQ ID NOs: 16, 26, and 150, respectively;
[0206] (f) CDRL1, CDRL2, and CDRL3 have the sequence of SEQ ID NOs: 16, 143, and 151, respectively;
[0207] (g) CDRL1, CDRL2, and CDRL3 have the sequence of SEQ ID NOs: 16, 145, and 148, respectively;
[0208] (h) CDRL1, CDRL2, and CDRL3 have the sequence of SEQ ID NOs: 16, 145, and 152, respectively;
[0209] (i) CDRL1, CDRL2, and CDRL3 have the sequence of SEQ ID NOs: 16, 144, and 43, respectively; or
[0210] (j) CDRL1, CDRL2, and CDRL3 have the sequence of SEQ ID NOs: 16, 147, and 43, respectively.

[0211] In related embodiments, the TREM2 agonist antigen binding proteins of the invention comprise a heavy chain variable region comprising a CDRH1, a CDRH2, and a CDRH3, wherein: (a) CDRH1, CDRH2, and CDRH3 have the sequence of SEQ ID NOs: 85, 170, and 176, respectively;
[0212] (b) CDRH1, CDRH2, and CDRH3 have the sequence of SEQ ID NOs: 85, 171, and 177, respectively;
[0213] (c) CDRH1, CDRH2, and CDRH3 have the sequence of SEQ ID NOs: 85, 172, and 177, respectively;
[0214] (d) CDRH1, CDRH2, and CDRH3 have the sequence of SEQ ID NOs: 85, 171, and 178, respectively;
[0215] (e) CDRH1, CDRH2, and CDRH3 have the sequence of SEQ ID NOs: 85, 171, and 179, respectively;
[0216] (f) CDRH1, CDRH2, and CDRH3 have the sequence of SEQ ID NOs: 85, 173, and 177, respectively;
[0217] (g) CDRH1, CDRH2, and CDRH3 have the sequence of SEQ ID NOs: 85, 91, and 176, respectively;
[0218] (h) CDRH1, CDRH2, and CDRH3 have the sequence of SEQ ID NOs: 85, 174, and 176, respectively;
[0219] (i) CDRH1, CDRH2, and CDRH3 have the sequence of SEQ ID NOs: 85, 175, and 178, respectively; or
[0220] (j) CDRH1, CDRH2, and CDRH3 have the sequence of SEQ ID NOs: 85, 91, and 178, respectively.

[0221] In some embodiments, the TREM2 agonist antigen binding proteins of the invention comprise a light chain variable region comprising a CDRL1, a CDRL2, and a CDRL3 and a heavy chain variable region comprising a CDRH1, a CDRH2, and a CDRH3, wherein:
[0222] (a) CDRL1, CDRL2, and CDRL3 have the sequence of SEQ ID NOs: 16, 143, and 148, respectively, and CDRH1, CDRH2, and CDRH3 have the sequence of SEQ ID NOs: 85, 170, and 176, respectively;
[0223] (b) CDRL1, CDRL2, and CDRL3 have the sequence of SEQ ID NOs: 16, 144, and 149, respectively, and CDRH1, CDRH2, and CDRH3 have the sequence of SEQ ID NOs: 85, 171, and 177, respectively;
[0224] (c) CDRL1, CDRL2, and CDRL3 have the sequence of SEQ ID NOs: 16, 145, and 43, respectively, and CDRH1, CDRH2, and CDRH3 have the sequence of SEQ ID NOs: 85, 172, and 177, respectively;
[0225] (d) CDRL1, CDRL2, and CDRL3 have the sequence of SEQ ID NOs: 16, 146, and 148, respectively, and CDRH1, CDRH2, and CDRH3 have the sequence of SEQ ID NOs: 85, 171, and 178, respectively;
[0226] (e) CDRL1, CDRL2, and CDRL3 have the sequence of SEQ ID NOs: 16, 26, and 150, respectively, and CDRH1, CDRH2, and CDRH3 have the sequence of SEQ ID NOs: 85, 171, and 179, respectively;
[0227] (f) CDRL1, CDRL2, and CDRL3 have the sequence of SEQ ID NOs: 16, 143, and 151, respectively, and CDRH1, CDRH2, and CDRH3 have the sequence of SEQ ID NOs: 85, 173, and 177, respectively;
[0228] (g) CDRL1, CDRL2, and CDRL3 have the sequence of SEQ ID NOs: 16, 145, and 148, respectively, and CDRH1, CDRH2, and CDRH3 have the sequence of SEQ ID NOs: 85, 91, and 176, respectively;
[0229] (h) CDRL1, CDRL2, and CDRL3 have the sequence of SEQ ID NOs: 16, 145, and 152, respectively, and CDRH1, CDRH2, and CDRH3 have the sequence of SEQ ID NOs: 85, 171, and 178, respectively;
[0230] (i) CDRL1, CDRL2, and CDRL3 have the sequence of SEQ ID NOs: 16, 143, and 151, respectively, and CDRH1, CDRH2, and CDRH3 have the sequence of SEQ ID NOs: 85, 174, and 176, respectively;
[0231] (j) CDRL1, CDRL2, and CDRL3 have the sequence of SEQ ID NOs: 16, 144, and 43, respectively, and CDRH1, CDRH2, and CDRH3 have the sequence of SEQ ID NOs: 85, 175, and 178, respectively; or
[0232] (k) CDRL1, CDRL2, and CDRL3 have the sequence of SEQ ID NOs: 16, 147, and 43, respectively, and CDRH1, CDRH2, and CDRH3 have the sequence of SEQ ID NOs: 85, 91, and 178, respectively.

[0233] In some embodiments, the TREM2 agonist antigen binding proteins of the invention may comprise a light chain variable region selected from LV-101, LV-102, LV-103, LV-104, LV-105, LV-106, LV-107, LV-108, LV-109, and LV-110, as shown in Table 3A, and/or a heavy chain variable region selected from HV-101, HV-102, HV-103, HV-104, HV-105, HV-106, HV-107, HV-108, HV-109, HV-110, and HV-111, as shown in Table 3B, or sequences that are at least 80% identical, at least 85% identical, at least 90% identical, or at least 95% identical to any of the sequences in Tables 3A and 3B. For instance, in some embodiments, the TREM2 agonist antigen binding proteins comprise a light chain variable region comprising (i) a sequence that is at least 90% identical to a sequence selected from SEQ ID NOs: 153-162, (ii) a sequence that is at least 95% identical to a sequence selected from SEQ ID NOs: 153-162, or (iii) a sequence selected from SEQ ID NOs: 153-162. In related embodiments, the TREM2 agonist antigen binding proteins comprise a heavy chain variable region comprising (i) a sequence that is at least 90% identical to a sequence selected from SEQ ID NOs: 180-190, (ii) a sequence that is at least 95% identical to a sequence selected from SEQ ID NOs: 180-190, or (iii) a sequence selected from SEQ ID NOs: 180-190.

[0234] Each of the light chain variable regions listed in Table 3A may be combined with any of the heavy chain variable regions listed in Table 3B to form an anti-TREM2 binding domain of the antigen binding proteins of the invention. Examples of such combinations include, but are not limited to: LV-101 (SEQ ID NO: 153) and HV-101 (SEQ ID NO: 180); LV-102 (SEQ ID NO: 154) and HV-102 (SEQ ID NO: 181); LV-103 (SEQ ID NO: 155) and HV-103 (SEQ ID NO: 182); LV-104 (SEQ ID NO: 156) and HV-104 (SEQ ID NO: 183); LV-105 (SEQ ID NO: 157) and HV-105 (SEQ ID NO: 184); LV-106 (SEQ ID NO: 158) and HV-106 (SEQ ID NO: 185); LV-107 (SEQ ID NO: 159) and HV-107 (SEQ ID NO: 186); LV-108 (SEQ ID NO: 160) and HV-108 (SEQ ID NO: 187); LV-106 (SEQ ID NO: 158) and HV-109 (SEQ ID NO: 188); LV-109 (SEQ ID NO: 161) and HV-110 (SEQ ID NO: 189); and LV-110 (SEQ ID NO: 162) and HV-111 (SEQ ID NO: 190).

TABLE 3C
Light Chain Variable Region Amino Acid Sequences for Reduced Affinity
TREM2 Antibodies

| Veriant | VL | VL Amino Acid | | | |
|---|---|---|---|---|---|
| Ab ID. | Group | Sequence | CDRL1 | CDRL2 | CDRL3 |
| 6E7 | LV-16 | DIQMTQSPSSVSASVGDRVT | RASQGISSWLA | AASSLQN | QQADSFPRT |
| | | ITCRASQGISSWLAWYQQKP | (SEQ ID NO: | (SEQ ID | (SEQ ID |
| | | GKAPKLLIYAASSLQNGVPS | 16) | NO: 28) | NO: 43) |
| | | RFSGSGSGTDFILTISSLQP | | | |
| | | EDFATYFCQQADSFPRTFGQ | | | |
| | | GTKLEIK (SEQ ID NO: | | | |
| | | 61) | | | |
| V9 | LV-16 | DIQMTQSPSSVSASVGDRVT | RASQGISSWLA | AASSLQN | QQADSFPRT |
| V30 | | ITCRASQGISSWLAWYQQKP | (SEQ ID NO: | (SEQ ID | (SEQ ID |
| V33 | | GKAPKLLIYAASSLQNGVPS | 16) | NO: 28) | NO: 43) |
| V44 | | RFSGSGSGTDFILTISSLQP | | | |
| V68 | | EDFATYFCQQADSFPRTFGQ | | | |
| | | GTKLEIK (SEQ ID NO: | | | |
| | | 61) | | | |
| V10 | LV- | DIQMTQSPSSVSASVGDRVT | RASQGISSWLA | SASSLQN | QQADSFPRT |
| | 201 | ITCRASQGISSWLAWYQQKP | (SEQ ID NO: | (SEQ ID | (SEQ ID |
| | | GKAPKLLIYSASSLQNGVPS | 16) | NO: 292) | NO: 43) |
| | | RFSGSGSGTDFILTISSLQP | | | |
| | | EDFATYFCQQADSFPRTFGQ | | | |
| | | GTKLEIK (SEQ ID NO: | | | |
| | | 295) | | | |
| V23 | LV- | DIQMTQSPSSVSASVGDRVT | RASQGISSWLA | AASSLQN | QQADSFPLT |
| | 202 | ITCRASQGISSWLAWYQQKP | (SEQ ID NO: | (SEQ ID | (SEQ ID |
| | | GKAPKLLIYAASSLQNGVPS | 16) | NO: 28) | NO: 294) |
| | | RFSGSGSGTDFILTISSLQP | | | |
| | | EDFATYFCQQADSFPLTFGQ | | | |
| | | GTKLEIK (SEQ ID NO: | | | |
| | | 296) | | | |
| V57 | LV- | DIQMTQSPSSVSASVGDRVT | AASQGISSWLA | AASSLQN | QQADSFPRT |
| | 203 | ITCAASQGISSWLAWYQQKP | (SEQ ID NO: | (SEQ ID | (SEQ ID |
| | | GKAPKLLIYAASSLQNGVPS | 290) | NO: 28) | NO: 43) |
| | | RFSGSGSGTDFILTISSLQP | | | |
| | | EDFATYFCQQADSFPRTFGQ | | | |
| | | GTKLEIK (SEQ ID NO: | | | |
| | | 297) | | | |
| V70 | LV- | DIQMTQSPSSVSASVGDRVT | RASQGISSWLA | AAGSLQN | QQADSFPRT |
| | 204 | ITCRASQGISSWLAWYQQKP | (SEQ ID NO: | (SEQ ID | (SEQ ID |
| | | GKAPKLLIYAAGSLQNGVPS | 16) | NO: 293) | NO: 43) |
| | | RFSGSGSGTDFILTISSLQP | | | |
| | | EDFATYFCQQADSFPRTFGQ | | | |
| | | GTKLEIK (SEQ ID NO: | | | |
| | | 298) | | | |
| V83 | LV- | DIQMTQSPSSVSASVGDRVT | RASQGISSWLA | AASSLQN | QQAVSFPRT |
| | 205 | ITCRASQGISSWLAWYQQKP | (SEQ ID NO: | (SEQ ID | (SEQ ID |
| | | GKAPKLLIYAASSLQNGVPS | 16) | NO: 28) | NO: 271) |
| | | RFSGSGSGTDFILTISSLQP | | | |
| | | EDFATYFCQQAVSFPRTFGQ | | | |
| | | GTKLEIK (SEQ ID NO: | | | |
| | | 299) | | | |
| V90 | LV- | DIQMTQSPSSVSASVGDRVT | RASQGISRWLA | AASSLQN | QQADSFPRT |
| | 206 | ITCRASQGISRWLAWYQQKP | (SEQ ID NO: | (SEQ ID | (SEQ ID |
| | | GKAPKLLIYAASSLQNGVPS | 291) | NO: 28) | NO: 43) |
| | | RFSGSGSGTDFILTISSLQP | | | |
| | | EDFATYFCQQADSFPRTFGQ | | | |
| | | GTKLEIK (SEQ ID NO: | | | |
| | | 300) | | | |

TABLE 3D
Heavy Chain Variable Region Amino Acid Sequences for Reduced Affinity
TREM2 Antibodies

| | | VH Amino | FR1/ | | | |
|---|---|---|---|---|---|---|
| Veriant | VH | Acid | CDRH1 | | | |
| Ab ID. | Group | Sequence | border | CDRH1 | CDRH2 | CDRH3 |
| 6E7 | HV- | EVQLVQSGAEV | YSFT | SYWIA | IIYPGDSDTRYSPSFQ | QRTFYYDSSDYFDY |
| | 15 | KKPGESLKISC | (SEQ | (SEQ | G (SEQ ID NO: | (SEQ ID NO: |
| | | KGSGYSFTSYW | ID | ID | 91) | 107) |
| | | IAWVRQMPGKG | NO: | NO: | | |
| | | LEWMGIIYPGD | 163) | 85) | | |
| | | SDTRYSPSFQG | | | | |
| | | QVTISADKSIS | | | | |
| | | TAYLQWSSLKA | | | | |
| | | SDTAMYFCARQ | | | | |
| | | RTFYYDSSDYF | | | | |
| | | DYWGQGTLVTV | | | | |
| | | SS (SEQ ID | | | | |
| | | NO: 124) | | | | |
| V9 | HV- | EVQLVQSGAEV | YSFT | SYWIA | IIYPGDSDTRYSPSFQ | QRGFYYDSSDYFDY |
| | 201 | KKPGESLKISC | (SEQ | (SEQ | G (SEQ ID NO: | (SEQ ID NO: |
| | | KGSGYSFTSYW | ID | ID | 91) | 304) |
| | | IAWVRQMPGKG | NO: | NO: | | |
| | | LEWMGIIYPGD | 163) | 85) | | |
| | | SDTRYSPSFQG | | | | |
| | | QVTISADKSIS | | | | |
| | | TAYLQWSSLKA | | | | |
| | | SDTAMYFCARQ | | | | |
| | | RGFYYDSSDYF | | | | |
| | | DYWGQGTLVTV | | | | |
| | | SS (SEQ ID | | | | |
| | | NO: 307) | | | | |
| V10 | HV- | EVQLVQSGAEV | YSFT | SYWIA | IIYPGDSDTRYSPSFQ | QRTFYYDSSDYFDY |
| V23 | 15 | KKPGESLKISC | (SEQ | (SEQ | G (SEQ ID NO: | (SEQ ID NO: |
| V57 | | KGSGYSFTSYW | ID | ID | 91) | 107) |
| V70 | | IAWVRQMPGKG | NO: | NO: | | |
| V83 | | LEWMGIIYPGD | 163) | 85) | | |
| | | SDTRYSPSFQG | | | | |
| | | QVTISADKSIS | | | | |
| | | TAYLQWSSLKA | | | | |
| | | SDTAMYFCARQ | | | | |
| | | RTFYYDSSDYF | | | | |
| | | DYWGQGTLVTV | | | | |
| | | SS (SEQ ID | | | | |
| | | NO: 124) | | | | |
| V30 | HV- | EVQLVQSGAEV | SSFT | SYWIA | IIYPGDSDTRYSPSFQ | QRTFYYDSSDYFDY |
| | 202 | KKPGESLKISC | (SEQ | (SEQ | G (SEQ ID NO: | (SEQ ID NO: |
| | | KGSGSSFTSYW | ID | ID | 91) | 107) |
| | | IAWVRQMPGKG | NO: | NO: | | |
| | | LEWMGIIYPGD | 301) | 85) | | |
| | | SDTRYSPSFQG | | | | |
| | | QVTISADKSIS | | | | |
| | | TAYLQWSSLKA | | | | |
| | | SDTAMYFCARQ | | | | |
| | | RTFYYDSSDYF | | | | |
| | | DYWGQGTLVTV | | | | |
| | | SS (SEQ ID | | | | |
| | | NO: 308) | | | | |
| V33 | HV- | EVQLVQSGAEV | YSFT | SYWIA | IIYPGDSDTRYSPSFQ | QRTFYGDSSDYFDY |
| | 203 | KKPGESLKISC | (SEQ | (SEQ | G (SEQ ID NO: | (SEQ ID NO: |
| | | KGSGYSFTSYW | ID | ID | 91) | 305) |
| | | IAWVRQMPGKG | NO: | NO: | | |
| | | LEWMGIIYPGD | 163) | 85) | | |
| | | SDTRYSPSFQG | | | | |
| | | QVTISADKSIS | | | | |
| | | TAYLQWSSLKA | | | | |
| | | SDTAMYFCARQ | | | | |
| | | RTFYGDSSDYF | | | | |
| | | DYWGQGTLVTV | | | | |
| | | SS (SEQ ID | | | | |
| | | NO: 309) | | | | |
| V44 | HV- | EVQLVQSGAEV | YSFT | SYWIA | IIYPSDSDTRYSPSFQ | QRTFYYDSSDYFDY |
| | 204 | KKPGESLKISC | (SEQ | (SEQ | G (SEQ ID NO: | (SEQ ID NO: |
| | | KGSGYSFTSYW | ID | ID | 303) | 107) |
| | | IAWVRQMPGKG | NO: | NO: | | |
| | | LEWMGIIYPSD | 163) | 85) | | |
| | | SDTRYSPSFQG | | | | |
| | | QVTISADKSIS | | | | |
| | | TAYLQWSSLKA | | | | |
| | | SDTAMYFCARQ | | | | |
| | | RTFYYDSSDYF | | | | |
| | | DYWGQGTLVTV | | | | |
| | | SS (SEQ ID | | | | |
| | | NO: 310) | | | | |
| V68 | HV- | EVQLVQSGAEV | YSFT | SYWIA | IIYPGDSDTRYSPSFQ | QRTFRYDSSDYFDY |
| | 205 | KKPGESLKISC | (SEQ | (SEQ | G (SEQ ID NO: | (SEQ ID NO: |
| | | KGSGYSFTSYW | ID | ID | 91) | 306) |
| | | IAWVRQMPGKG | NO: | NO: | | |
| | | LEWMGIIYPGD | 163) | 85) | | |
| | | SDTRYSPSFQG | | | | |
| | | QVTISADKSIS | | | | |
| | | TAYLQWSSLKA | | | | |
| | | SDTAMYFCARQ | | | | |
| | | RTFRYDSSDYF | | | | |
| | | DYWGQGTLVTV | | | | |
| | | SS (SEQ ID | | | | |
| | | NO: 311) | | | | |
| V90 | HV- | EVQLVQSGAEV | YSFT | SEWIA | IIYPGDSDTRYSPSFQ | QRTFYYDSSDYFDY |
| | 206 | KKPGESLKISC | (SEQ | (SEQ | G (SEQ ID NO: | (SEQ ID NO: |
| | | KGSGYSFTSEW | ID | ID | 91) | 107) |
| | | IAWVRQMPGKG | NO: | NO: | | |
| | | LEWMGIIYPGD | 163) | 302) | | |
| | | SDTRYSPSFQG | | | | |
| | | QVTISADKSIS | | | | |
| | | TAYLQWSSLKA | | | | |
| | | SDTAMYFCARQ | | | | |
| | | RTFYYDSSDYF | | | | |
| | | DYWGQGTLVTV | | | | |
| | | SS (SEQ ID | | | | |
| | | NO: 312) | | | | |

[0235] In some embodiments, the TREM2 agonist antigen binding proteins of the invention may comprise one or more of the CDRs from the reduced affinity variants presented in Table 3C (light chain CDRs; i.e. CDRLs) and Table 3D (heavy chain CDRs, i.e. CDRHs). In some embodiments, the TREM2 agonist antigen binding proteins comprise a consensus CDR sequence derived from the reduced affinity variants. For instance, in one embodiment, the TREM2 agonist antigen binding proteins comprise a CDRL1 consensus sequence of X₁ASQGISX₂WLA (SEQ ID NO: 284), where X₁ is R or A; and X₂ is S or R. In another embodiment, the TREM2 agonist antigen binding proteins comprise a CDRL2 consensus sequence of X₁AX₂SLQN (SEQ TD NO: 285), where X₁ is A or S; and X₂ is S or G. In another embodiment, the TREM2 agonist antigen binding proteins comprise a CDRL3 consensus sequence of QQAX₁SFPX₂T (SEQ ID NO: 286), where X₁ is D or V; and X₂ is R or L. In another embodiment, the TREM2 agonist antigen binding proteins comprise a CDRH1 consensus sequence of SX₁WIA (SEQ ID NO: 287), where X₁ is Y or E. In yet another embodiment, the TREM2 agonist antigen binding proteins comprise a CDRH2 consensus sequence of IIYPX₁DSDTRYSPSFQG (SEQ ID NO: 288), where X₁ is G or S. In still another embodiment, the TREM2 agonist antigen binding proteins comprise a CDRH3 consensus sequence of QRX₁FX₂X₃DSSDYFDY (SEQ ID NO: 289), where X₁ is T or G; X₂ is Y or R; and X₃ is Y or G. In some embodiments, the TREM2 agonist antigen binding proteins comprise a light chain variable region comprising complementarity determining regions CDRL1, CDRL2, and CDRL3 and a heavy chain variable region comprising complementarity determining regions CDRH1, CDRH2, and CDRH3, wherein CDRL1 comprises the sequence of SEQ ID NO: 284, CDRL2 comprises the consensus sequence of SEQ ID NO: 285, CDRL3 comprises the consensus sequence of SEQ ID NO: 286, CDRH1 comprises the sequence of SEQ ID NO: 287, CDRH2 comprises the consensus sequence of SEQ ID NO: 288, and CDRH3 comprises the consensus sequence of SEQ ID NO: 289.

[0236] In some embodiments, the TREM2 agonist antigen binding proteins of the invention comprise a CDRL1 comprising a sequence selected from SEQ ID NOs: 16, 290, and 291; a CDRL2 comprising a sequence selected from SEQ ID NOs: 28, 292, and 293; a CDRL3 comprising a sequence selected from SEQ ID NOs: 43, 294, and 271; a CDRH1 comprising the sequence of SEQ ID NO: 85 or SEQ ID NO: 302; a CDRH2 comprising the sequence of SEQ ID NO: 91 or SEQ ID NO: 303; and a CDRH3 comprising a sequence selected from SEQ ID NOs: 107 and 304-306.

[0237] In some embodiments, the TREM2 agonist antigen binding proteins of the invention comprise a light chain variable region comprising a CDRL1, a CDRL2, and a CDRL3, wherein:
[0238] (a) CDRL1, CDRL2, and CDRL3 have the sequence of SEQ ID NOs: 16, 28, and 43, respectively;
[0239] (b) CDRL1, CDRL2, and CDRL3 have the sequence of SEQ ID NOs: 16, 292, and 43, respectively;
[0240] (c) CDRL1, CDRL2, and CDRL3 have the sequence of SEQ ID NOs: 16, 28, and 294, respectively;
[0241] (d) CDRL1, CDRL2, and CDRL3 have the sequence of SEQ ID NOs: 290, 28, and 43, respectively;
[0242] (e) CDRL1, CDRL2, and CDRL3 have the sequence of SEQ ID NOs: 16, 293, and 43, respectively;
[0243] (f) CDRL1, CDRL2, and CDRL3 have the sequence of SEQ ID NOs: 16, 28, and 271, respectively; or
[0244] (g) CDRL1, CDRL2, and CDRL3 have the sequence of SEQ ID NOs: 291, 28, and 43, respectively.

[0245] In related embodiments, the TREM2 agonist antigen binding proteins of the invention comprise a heavy chain variable region comprising a CDRH1, a CDRH2, and a CDRH3, wherein:
[0246] (a) CDRH1, CDRH2, and CDRH3 have the sequence of SEQ ID NOs: 85, 91, and 304, respectively;
[0247] (b) CDRH1, CDRH2, and CDRH3 have the sequence of SEQ ID NOs: 85, 91, and 107, respectively;
[0248] (c) CDRH1, CDRH2, and CDRH3 have the sequence of SEQ ID NOs: 85, 91, and 305, respectively;
[0249] (d) CDRH1, CDRH2, and CDRH3 have the sequence of SEQ ID NOs: 85, 303, and 107, respectively;
[0250] (e) CDRH1, CDRH2, and CDRH3 have the sequence of SEQ ID NOs: 85, 91, and 306, respectively; or
[0251] (f) CDRH1, CDRH2, and CDRH3 have the sequence of SEQ ID NOs: 302, 91, and 107, respectively.

[0252] In some embodiments, the TREM2 agonist antigen binding proteins of the invention comprise a light chain variable region comprising a CDRL1, a CDRL2, and a CDRL3 and a heavy chain variable region comprising a CDRH1, a CDRH2, and a CDRH3, wherein:
[0253] (a) CDRL1, CDRL2, and CDRL3 have the sequence of SEQ ID NOs: 16, 28, and 43, respectively, and CDRH1, CDRH2, and CDRH3 have the sequence of SEQ ID NOs: 85, 91, and 304, respectively;
[0254] (b) CDRL1, CDRL2, and CDRL3 have the sequence of SEQ ID NOs: 16, 292, and 43, respectively, and CDRH1, CDRH2, and CDRH3 have the sequence of SEQ ID NOs: 85, 91, and 107, respectively;
[0255] (c) CDRL1, CDRL2, and CDRL3 have the sequence of SEQ ID NOs: 16, 28, and 294, respectively, and CDRH1, CDRH2, and CDRH3 have the sequence of SEQ ID NOs: 85, 91, and 107, respectively;
[0256] (d) CDRL1, CDRL2, and CDRL3 have the sequence of SEQ ID NOs: 16, 28, and 43, respectively, and CDRH1, CDRH2, and CDRH3 have the sequence of SEQ ID NOs: 85, 91, and 107, respectively;
[0257] (e) CDRL1, CDRL2, and CDRL3 have the sequence of SEQ ID NOs: 16, 28, and 43, respectively, and CDRH1, CDRH2, and CDRH3 have the sequence of SEQ ID NOs: 85, 91, and 305, respectively;
[0258] (f) CDRL1, CDRL2, and CDRL3 have the sequence of SEQ ID NOs: 16, 28, and 43, respectively, and CDRH1, CDRH2, and CDRH3 have the sequence of SEQ ID NOs: 85, 303, and 107, respectively;
[0259] (g) CDRL1, CDRL2, and CDRL3 have the sequence of SEQ ID NOs: 290, 28, and 43, respectively, and CDRH1, CDRH2, and CDRH3 have the sequence of SEQ ID NOs: 85, 91, and 107, respectively;
[0260] (h) CDRL1, CDRL2, and CDRL3 have the sequence of SEQ ID NOs: 16, 28, and 43, respectively, and CDRH1, CDRH2, and CDRH3 have the sequence of SEQ ID NOs: 85, 91, and 306, respectively;
[0261] (i) CDRL1, CDRL2, and CDRL3 have the sequence of SEQ ID NOs: 16, 293, and 43, respectively, and CDRH1, CDRH2, and CDRH3 have the sequence of SEQ ID NOs: 85, 91, and 107, respectively;
[0262] (j) CDRL1, CDRL2, and CDRL3 have the sequence of SEQ ID NOs: 16, 28, and 271, respectively, and CDRH1, CDRH2, and CDRH3 have the sequence of SEQ ID NOs: 85, 91, and 107, respectively; or
[0263] (k) CDRL1, CDRL2, and CDRL3 have the sequence of SEQ ID NOs: 291, 28, and 43, respectively, and CDRH1, CDRH2, and CDRH3 have the sequence of SEQ ID NOs: 302, 91, and 107, respectively.

[0264] In some embodiments, the TREM2 agonist antigen binding proteins of the invention may comprise a light chain variable region selected from LV-16, LV-201, LV-202, LV-203, LV-204, LV-205, and LV-206, as shown in Table 3C, and/or a heavy chain variable region selected from HV-15, HV-201, HV-202, HV-203, HV-204, HV-205, and HV-206, as shown in Table 3D, or sequences that are at least 80% identical, at least 85% identical, at least 90% identical, or at least 95% identical to any of the sequences in Tables 3C and 3D. For instance, in certain embodiments, the TREM2 agonist antigen binding proteins comprise a light chain variable region comprising (i) a sequence that is at least 90% identical to a sequence selected from SEQ ID NOs: 61 and 295-300, (ii) a sequence that is at least 95% identical to a sequence selected from SEQ ID NOs: 61 and 295-300, or (iii) a sequence selected from SEQ ID NOs: 61 and 295-300. In related embodiments, the TREM2 agonist antigen binding proteins comprise a heavy chain variable region comprising (i) a sequence that is at least 90% identical to a sequence selected from SEQ ID NOs: 124 and 307-312, (ii) a sequence that is at least 95% identical to a sequence selected from SEQ ID NOs: 124 and 307-312, or (iii) a sequence selected from SEQ ID NOs: 124 and 307-312.

[0265] In some embodiments, each of the light chain variable regions listed in Table 3C may be combined with any of the heavy chain variable regions listed in Table 3D to form an anti-TREM2 binding domain of the antigen binding proteins of the invention. Examples of such combinations include, but are not limited to: LV-16 (SEQ ID NO: 61) and HV-201 (SEQ ID NO: 307); LV-201 (SEQ ID NO: 295) and HV-15 (SEQ ID NO: 124); LV-202 (SEQ ID NO: 296) and HV-15 (SEQ ID NO: 124); LV-16 (SEQ ID NO: 61) and HV-202 (SEQ ID NO: 308); LV-16 (SEQ ID NO: 61) and HV-203 (SEQ ID NO: 309); LV-16 (SEQ ID NO: 61) and HV-204 (SEQ ID NO: 310); LV-203 (SEQ ID NO: 297) and HV-15 (SEQ ID NO: 124); LV-16 (SEQ ID NO: 61) and HV-205 (SEQ ID NO: 311); LV-204 (SEQ ID NO: 298) and HV-15 (SEQ ID NO: 124); LV-205 (SEQ ID NO: 299) and HV-15 (SEQ ID NO: 124); and LV-206 (SEQ ID NO: 300) and HV-206 (SEQ ID NO: 312).

[0266] In some embodiments, the TREM2 agonist antigen binding proteins comprise one or more CDRs of the anti-TREM2 antibody variants set forth in Table 3E. In some embodiments, the TREM2 agonist antigen binding proteins comprise the light chain variable region and heavy chain variable region of the anti-TREM2 antibody variants set forth in Table 3E.

TABLE 3E
Exemplary Variable Region Amino Acid Sequences of Engineered Antibodies

| Ab ID. | LC variable region | CDRL1 | CDRL2 | CDRL3 |
|---|---|---|---|---|
| 24G6 | DIVMTQSPDSLAVSLGERATIN | KSSQSVLYSS | WASTRES | QQYYSTPLT |
| (SST28347 | CKSSQSVLYSSNNKHFLAWYQQ | NNKHFLA | (SEQ ID | (SEQ ID |
| and | KPGQPPKLLIYWASTRESGVPD | (SEQ ID | NO: 22) | NO: 35) |
| SST204812) | RFSGSGSGTDFTLTISSLQAED | NO: 8) | | |
| | VAVYYCQQYYSTPLTFGGGTKV | | | |
| | EIK (SEQ ID NO: 326) | | | |
| 6E7 | DIQMTQSPSSVSASVGDRVTIT | RASQGISSWL | AASSLQS | QQADAFPRT |
| (SST29857) | CRASQGISSWLAWYQQKPGKAP | A | (SEQ ID | (SEQ ID |
| | KLLIYAASSLQSGVPSRFSGSG | (SEQ ID | NO: 369) | NO: 370) |
| | SGTDFTLTISSLQPEDFATYFC | NO: 16) | | |
| | QQADAFPRTFGQGTKLEIK | | | |
| | (SEQ ID NO: 328) | | | |
| 13E7 | EIVMTQSPATLSVSPGERATLS | RASQSVSSNL | GASTRAT | LQDNNFPPT |
| (SST202443) | CRASQSVSSNLAWFQQKPGQAP | A (SEQ ID | (SEQ ID | (SEQ ID |
| | RLLIYGASTRATGIPARFSGSG | NO: 10) | NO: 23) | NO: 372) |
| | SGTEFTLTISSLQPEDFAVYYC | | | |
| | LQDNNFPPTFGQGTKVDIK | | | |
| | (SEQ ID NO: 330) | | | |
| 5E3 | DIQMTQSPSSLSASVGDRVTIT | RASQGISNYL | AASSLQS | QQYSTYPFT |
| (SST29825) | CRASQGISNYLAWYQQKPGKAP | A (SEQ ID | (SEQ ID | (SEQ ID |
| | KSLIYAASSLQSGVPSRFSGSG | NO: 17) | NO: 29) | NO: 44) |
| | SGTDFTLTISSLQPEDFATYYC | | | |
| | QQYSTYPFTFGQGTKVDIK | | | |
| | (SEQ ID NO: 332) | | | |
| Ab ID. | HC variable region | CDRH1 | CDRH2 | CDRH3 |
| 24G6 | EVQLLESGGGLVQPGGSLRLSC | SYAMS | AISGSGGSTY | AYTPMAFFDY |
| (SST28347 | AASGFTFSSYAMSWVRQAPGKG | (SEQ ID | YAESVKG | (SEQ ID |
| and | LEWVSAISGSGGSTYYAESVKG | NO: 77) | (SEQ ID | NO: 98) |
| SST204812) | RFTISRDNSKNTLYLQMNSLRA | | NO: 368) | |
| | EDTAVYYCAKAYTPMAFFDYWG | | | |
| | QGTLVTVSS (SEQ ID NO: | | | |
| | 327) | | | |
| 6E7 | EVQLVQSGAEVKKPGESLKISC | SYWIA | IIYPGDADAR | QRTFYYDSSD |
| (SST29857) | KGSGYSFTSYWIAWVRQMPGKG | (SEQ ID | YSPSFQG | YFDY |
| | LEWMGIIYPGDADARYSPSFQG | NO: 85) | (SEQ ID | (SEQ ID |
| | QVTISADKSISTAYLQWSSLKA | | NO: 371) | NO: 107) |
| | SDTAMYFCARQRTFYYDSSDYF | | | |
| | DYWGQGTLVTVSS (SEQ ID | | | |
| | NO: 329) | | | |
| 13E7 | EVQLVQSGAEVKKPGESLKISC | SYWIG | IIYPGDADAR | RRQGIFGDAL |
| (SST202443) | KGSGYSFTSYWIGWVRQMPGKG | (SEQ ID | YSPSFQG | DF |
| | LEWMGIIYPGDADARYSPSFQG | NO: 81) | (SEQ ID | (SEQ ID |
| | QVTISADKSISTAYLQWSSLKA | | NO: 373) | NO: 374) |
| | SDTAMYFCARRRQGIFGDALDF | | | |
| | WGQGTLVTVSS (SEQ ID | | | |
| | NO: 331) | | | |
| | QVQLVQSGAEVKKPGASVKVSC | GYYIH | WINPYSGGTT | DAGYLALYGT |
| | KASGYTFTGYYIHWVRQAPGQG | (SEQ ID | SAQKFQG | DV (SEQ ID |
| | LEWMGWINPYSGGTTSAQKFQG | NO: 86) | (SEQ ID | NO: 375) |
| | RVIMIRDISTSSAYMELSRLRS | | NO: 94) | |
| | DDTAVYYCARDAGYLALYGTDV | | | |
| | WGQGTLVTVSS (SEQ ID | | | |
| | NO: 333) | | | |

[0267] In some embodiments, the TREM2 agonist antigen binding protein comprises a light chain variable region comprising a CDRL1, a CDRL2, and a CDRL3, wherein:
[0268] (a) CDRL1, CDRL2, and CDRL3 have the sequence of SEQ ID NOs: 16, 369, and 370, respectively;
[0269] (b) CDRL1, CDRL2, and CDRL3 have the sequence of SEQ ID NOs: 10, 23, and 372, respectively; or
[0270] (c) CDRL1, CDRL2, and CDRL3 have the sequence of SEQ ID NOs: 6, 21, and 33, respectively; (d) CDRL1, CDRL2, and CDRL3 have the sequence of SEQ ID NOs: 6, 20, and 33, respectively.

[0271] In some embodiments, the TREM2 agonist antigen binding protein comprises a heavy chain variable region comprising a CDRH1, a CDRH2, and a CDRH3, wherein:
[0272] (a) CDRH1, CDRH2, and CDRH3 have the sequence of SEQ ID NOs: 77, 368, and 98, respectively;
[0273] (b) CDRH1, CDRH2, and CDRH3 have the sequence of SEQ ID NOs: 85, 371, and 107, respectively;
[0274] (c) CDRH1, CDRH2, and CDRH3 have the sequence of SEQ ID NOs: 81, 373, and 374, respectively; or
[0275] (d) CDRH1, CDRH2, and CDRH3 have the sequence of SEQ ID NOs: 86, 94, and 375, respectively.

[0276] In some embodiments, the TREM2 agonist antigen binding protein comprises a light chain variable region comprising a CDRL1, a CDRL2, and a CDRL3 and a heavy chain variable region comprising a CDRH1, a CDRH2, and a CDRH3, wherein:
[0277] (a) CDRL1, CDRL2, and CDRL3 have the sequence of SEQ ID NOs: 8, 22, and 35, respectively, and CDRH1, CDRH2, and CDRH3 have the sequence of SEQ ID NOs: 77, 368, and 98, respectively;
[0278] (b) CDRL1, CDRL2, and CDRL3 have the sequence of SEQ ID NOs: 16, 369, and 370, respectively, and CDRH1, CDRH2, and CDRH3 have the sequence of SEQ ID NOs: 85, 371, and 107, respectively;
[0279] (c) CDRL1, CDRL2, and CDRL3 have the sequence of SEQ ID NOs: 10, 23, and 372, respectively, and CDRH1, CDRH2, and CDRH3 have the sequence of SEQ ID NOs: 81, 373, and 374, respectively; or
[0280] (d) CDRL1, CDRL2, and CDRL3 have the sequence of SEQ ID NOs: 17, 29, and 44, respectively, and CDRH1, CDRH2, and CDRH3 have the sequence of SEQ ID NOs: 86, 94, and 375, respectively.

[0281] Accordingly, in some embodiments, the TREM2 agonist antigen binding protein comprises a light chain variable region comprising a CDRL1, a CDRL2, and a CDRL3, and a heavy chain variable region comprising a CDRH1, a CDRH2, and a CDRH3, wherein the CDRL1, CDRL2, and CDRL3 have the sequence of SEQ ID NOs: 10, 23, and 372, respectively, and the CDRH1, CDRH2, and CDRH3 have the sequence of SEQ ID NOs: 81, 373, and 374, respectively.

[0282] In some embodiments therefore, the present invention provides a method of treating ALSP in a human patient, the method comprising administering to the patient an effective amount of a TREM2 agonist antigen binding protein comprising a CDRL1, CDRL2, and CDRL3 having the sequence of SEQ ID NOs: 10, 23, and 372, respectively, and a CDRH1, CDRH2, and CDRH3 having the sequence of SEQ ID NOs: 81, 373, and 374, respectively. In certain embodiments, the antibody is human. In some embodiments, the TREM2 agonist antigen binding protein comprises
[0283] (a) a light chain variable region comprising the amino acid sequence of SEQ ID NO: 326 and a heavy chain variable region comprising the amino acid sequence of SEQ ID NO: 327;
[0284] (b) a light chain variable region comprising the amino acid sequence of SEQ ID NO: 328 and a heavy chain variable region comprising the amino acid sequence of SEQ ID NO: 329;
[0285] (c) a light chain variable region comprising the amino acid sequence of SEQ ID NO: 330 and a heavy chain variable region comprising the amino acid sequence of SEQ ID NO: 331; or
[0286] (d) a light chain variable region comprising the amino acid sequence of SEQ ID NO: 332 and a heavy chain variable region comprising the amino acid sequence of SEQ ID NO: 333.

[0287] In some embodiments, the TREM2 agonist antigen binding protein comprises a light chain variable region comprising the amino acid sequence of SEQ ID NO: 330 and a heavy chain variable region comprising the amino acid sequence of SEQ ID NO: 331.

[0288] In some embodiments therefore, the present invention provides a method of treating ALSP in a human patient, the method comprising administering to the patient an effective amount of a TREM2 agonist antigen binding protein comprising a light chain variable region comprising the amino acid sequence of SEQ ID NO: 330 and a heavy chain variable region comprising the amino acid sequence of SEQ ID NO: 331. In certain embodiments, the antibody is human.

[0289] In some embodiments, the TREM2 agonist antigen binding proteins of the invention comprise a light chain variable region consisting of or consisting essentially of the amino acid sequence of SEQ ID NO: 326, 328, 330 or 332. In some embodiments, the TREM2 agonist antigen binding proteins of the invention comprise a heavy chain variable region consisting of or consisting essentially of the amino acid sequence of SEQ ID NO: 327, 329, 331 or 333. In a specific embodiment, the TREM2 agonist antigen binding proteins of the invention comprise a light chain variable region and a heavy chain variable region, wherein the light chain variable region consisting of or consisting essentially of the amino acid sequence of SEQ ID NO: 326 and the heavy chain variable region consisting of or consisting essentially of the amino acid sequence of SEQ ID NO: 327. In a specific embodiment, the TREM2 agonist antigen binding proteins of the invention comprise a light chain variable region and a heavy chain variable region, wherein the light chain variable region consisting of or consisting essentially of the amino acid sequence of SEQ ID NO: 328 and the heavy chain variable region consisting of or consisting essentially of the amino acid sequence of SEQ ID NO: 329. In a specific embodiment, the TREM2 agonist antigen binding proteins of the invention comprise a light chain variable region and a heavy chain variable region, wherein the light chain variable region consisting of or consisting essentially of the amino acid sequence of SEQ ID NO: 330 and the heavy chain variable region consisting of or consisting essentially of the amino acid sequence of SEQ ID NO: 331. In a specific embodiment, the TREM2 agonist antigen binding proteins of the invention comprise a light chain variable region and a heavy chain variable region, wherein the light chain variable region consisting of or consisting essentially of the amino acid sequence of SEQ ID NO: 332 and the heavy chain variable region consisting of or consisting essentially of the amino acid sequence of SEQ ID NO: 333.

[0290] In some embodiments, each of the light chain variable regions disclosed in Tables 1A, 3A, 3C, and 3E and each of the heavy chain variable regions disclosed in Tables 1B, 3B, 3D, and 3E may be attached to the light chain constant regions (Table 4) and heavy chain constant regions (Table 5) to form complete antibody light and heavy chains, respectively, as further discussed below. Further, each of the generated heavy and light chain sequences may be combined to form a complete antibody structure. It should be understood that the heavy chain and light chain variable regions provided herein can also be attached to other constant domains having different sequences than the exemplary sequences listed herein.

[0291] In some embodiments, exemplary TREM2 agonist antibody having a light chain variable region with a light chain constant domain and a heavy chain variable region with a heavy chain constant region are disclosed in Table 3F.

TABLE 3F
Light Chain and Heavy Chain Amino Acid Sequences of Exemplary Antibodies

| Ab ID. | | Sequence |
|---|---|---|
| 24G6 | LC | MDMRVPAQLLGLLLLWLRGARCDIVMTQSPDSLAVSLGERATINCKSS |
| (SST28347) | | QSVLYSSNNKHFLAWYQQKPGQPPKLLIYWASTRESGVPDRFSGSGSG |
| | | TDFTLTISSLQAEDVAVYYCQQYYSTPLTFGGGTKVEIKRTVAAPSVF |
| | | IFPPSDEQLKSGTASVVCLLNNFYPREAKVQWKVDNALQSGNSQESVT |
| | | EQDSKDSTYSLSSTLTLSKADYEKHKVYACEVTHQGLSSPVTKSFNRG |
| | | EC (SEQ ID NO: 334) |
| | HC | MDMRVPAQLLGLLLLWLRGARCEVQLLESGGGLVQPGGSLRLSCAASG |
| | | FTFSSYAMSWVRQAPGKGLEWVSAISGSGGSTYYAESVKGRFTISRDN |
| | | SKNTLYLQMNSLRAEDTAVYYCAKAYIPMAFFDYWGQGTLVTVSSAST |
| | | KGPSVFPLAPSSKSTSGGTAALGCLVKDYFPEPVTVSWNSGALTSGVH |
| | | TFPAVLQSSGLYSLSSVVTVPSSSLGTQTYICNVNHKPSNTKVDKKVE |
| | | PKSCDKTHTCPPCPAPELLGGPSVFLFPPKPKDTLMISRTPEVTCVVV |
| | | DVSHEDPEVKFNWYVDGVEVHNAKTKPCEEQYGSTYRCVSVLTVLHQD |
| | | WLNGKEYKCKVSNKALPAPIEKTISKAKGQPREPQVYTLPPSREEMTK |
| | | NQVSLTCLVKGFYPSDIAVEWESNGQPENNYKTTPPVLDSDGSFFLYS |
| | | KLTVDKSRWQQGNVFSCSVMHEALHNHYTQKSLSLSPGK (SEQ ID |
| | | NO: 335) |
| 24G6 | LC | MDMRVPAQLLGLLLLWLRGARCDIVMTQSPDSLAVSLGERATINCKSS |
| (SST204812) | | QSVLYSSNNKHFLAWYQQKPGQPPKLLIYWASTRESGVPDRFSGSGSG |
| | | TDFTLTISSLQAEDVAVYYCQQYYSTPLTFGGGTKVEIKRTVAAPSVF |
| | | IFPPSDEQLKSGTASVVCLLNNFYPREAKVQWKVDNALQSGNSQESVT |
| | | EQDSKDSTYSLSSTLTLSKADYEKHKVYACEVTHQGLSSPVTKSFNRG |
| | | EC (SEQ ID NO: 334) |
| | HC | MDMRVPAQLLGLLLLWLRGARCEVQLLESGGGLVQPGGSLRLSCAASG |
| | | FTFSSYAMSWVRQAPGKGLEWVSAISGSGGSTYYAESVKGRFTISRDN |
| | | SKNTLYLQMNSLRAEDTAVYYCAKAYTPMAFFDYWGQGTLVTVSSAST |
| | | KGPSVFPLAPSSRSTSESTAALGCLVKDYFPEPVTVSWNSGALTSGVH |
| | | TFPAVLQSSGLYSLSSVVTVPSSNFGTQTYTCNVDHKPSNTKVDKTVE |
| | | RKCCVECPPCPAPELLGGPSVFLFPPKPKDTLMISRTPEVTCVVVDVS |
| | | HEDPEVKFNWYVDGVEVHNAKTKPCEEQYGSTYRCVSVLTVLHQDWLN |
| | | GKEYKCKVSNKALPAPIEKTISKAKGQPREPQVYTLPPSREEMTKNQV |
| | | SLTCLVKGFYPSDIAVEWESNGQPENNYKTTPPVLDSDGSFFLYSKLT |
| | | VDKSRWQQGNVFSCSVMHEALHNHYTQKSLSLSPGK (SEQ ID NO: |
| | | 336) |
| 6E7 | LC | MDMRVPAQLLGLLLLWLRGARCDIQMTQSPSSVSASVGDRVTITCRAS |
| (SST29857) | | QGISSWLAWYQQKPGKAPKLLIYAASSLQSGVPSRFSGSGSGTDFILT |
| | | ISSLQPEDFATYFCQQADAFPRTFGQGTKLEIKRTVAAPSVFIFPPSD |
| | | EQLKSGTASVVCLLNNFYPREAKVQWKVDNALQSGNSQESVTEQDSKD |
| | | STYSLSSTLTLSKADYEKHKVYACEVTHQGLSSPVTKSFNRGEC |
| | | (SEQ ID NO: 337) |
| | HC | MDMRVPAQLLGLLLLWLRGARCEVQLVQSGAEVKKPGESLKISCKGSG |
| | | YSFTSYWIAWVRQMPGKGLEWMGIIYPGDADARYSPSFQGQVTISADK |
| | | SISTAYLQWSSLKASDTAMYFCARQRTFYYDSSDYFDYWGQGTLVTVS |
| | | SASTKGPSVFPLAPSSRSTSESTAALGCLVKDYFPEPVTVSWNSGALT |
| | | SGVHTFPAVLQSSGLYSLSSVVTVPSSNFGTQTYTCNVDHKPSNTKVD |
| | | KTVERKCCVECPPCPAPELLGGPSVFLFPPKPKDTLMISRTPEVTCVV |
| | | VDVSHEDPEVKFNWYVDGVEVHNAKTKPCEEQYGSTYRCVSVLTVLHQ |
| | | DWLNGKEYKCKVSNKALPAPIEKTISKAKGQPREPQVYTLPPSREEMT |
| | | KNQVSLICLVKGFYPSDIAVEWESNGQPENNYKTIPPVLDSDGSFFLY |
| | | SKLTVDKSRWQQGNVFSCSVMHEALHNHYTQKSLSLSPGK (SEQ ID |
| | | NO: 338) |
| 13E7 | LC | MDMRVPAQLLGLLLLWLRGARCEIVMTQSPAILSVSPGERATLSCRAS |
| (SST202443) | | QSVSSNLAWFQQKPGQAPRLLIYGASTRATGIPARFSGSGSGTEFTLT |
| | | ISSLQPEDFAVYYCLQDNNFPPTFGQGTKVDIKRTVAAPSVFIFPPSD |
| | | EQLKSGTASVVCLLNNFYPREAKVQWKVDNALQSGNSQESVTEQDSKD |
| | | STYSLSSTLTLSKADYEKHKVYACEVTHQGLSSPVTKSFNRGEC |
| | | (SEQ ID NO: 339) |
| | HC | MDMRVPAQLLGLLLLWLRGARCEVQLVQSGAEVKKPGESLKISCKGSG |
| | | YSFTSYWIGWVRQMPGKGLEWMGIIYPGDADARYSPSFQGQVTISADK |
| | | SISTAYLQWSSLKASDTAMYFCARRRQGIFGDALDFWGQGTLVTVSSA |
| | | STKGPSVFPLAPSSKSTSGGTAALGCLVKDYFPEPVTVSWNSGALTSG |
| | | VHTFPAVLQSSGLYSLSSVVTVPSSSLGTQTYICNVNHKPSNTKVDKK |
| | | VEPKSCDKTHTCPPCPAPELLGGPSVFLFPPKPKDTLMISRTPEVTCV |
| | | VVDVSHEDPEVKFNWYVDGVEVHNAKTKPCEEQYGSTYRCVSVLTVLH |
| | | QDWLNGKEYKCKVSNKALPAPIEKTISKAKGQPREPQVYTLPPSREEM |
| | | TKNQVSLTCLVKGFYPSDIAVEWESNGQPENNYKTTPPVLDSDGSFFL |
| | | YSKLTVDKSRWQQGNVFSCSVMHEALHNHYTQKSLSLSPGK (SEQ |
| | | ID NO: 340) |
| 5E3 | LC | MDMRVPAQLLGLLLLWLRGARCDIQMTQSPSSLSASVGDRVTITCRAS |
| (SST29825) | | QGISNYLAWYQQKPGKAPKSLIYAASSLQSGVPSRFSGSGSGTDFILT |
| | | ISSLQPEDFATYYCQQYSTYPFTFGQGTKVDIKRTVAAPSVFIFPPSD |
| | | EQLKSGTASVVCLLNNFYPREAKVQWKVDNALQSGNSQESVTEQDSKD |
| | | STYSLSSTLTLSKADYEKHKVYACEVTHQGLSSPVTKSFNRGEC |
| | | (SEQ ID NO: 341) |
| | HC | MDMRVPAQLLGLLLLWLRGARCQVQLVQSGAEVKKPGASVKVSCKASG |
| | | YTFTGYYIHWVRQAPGQGLEWMGWINPYSGGTTSAQKFQGRVTMTRDT |
| | | STSSAYMELSRLRSDDTAVYYCARDAGYLALYGTDVWGQGTLVTVSSA |
| | | STKGPSVFPLAPSSRSTSESTAALGCLVKDYFPEPVTVSWNSGALTSG |
| | | VHTFPAVLQSSGLYSLSSVVTVPSSNFGTQTYTCNVDHKPSNTKVDKT |
| | | VERKCCVECPPCPAPELLGGPSVFLFPPKPKDTLMISRTPEVTCVVVD |
| | | VSHEDPEVKFNWYVDGVEVHNAKTKPCEEQYGSTYRCVSVLTVLHQDW |
| | | LNGKEYKCKVSNKALPAPIEKTISKAKGQPREPQVYTLPPSREEMTKN |
| | | QVSLTCLVKGFYPSDIAVEWESNGQPENNYKTTPPVLDSDGSFFLYSK |
| | | LTVDKSRWQQGNVFSCSVMHEALHNHYTQKSLSLSPGK (SEQ ID |
| | | NO: 342) |
| 24G6-1 | LC | DIVMTQSPDSLAVSLGERATINCKSSQSVLYSSNNKHFLAWYQQKPGQ |
| (SST28347- | | PPKLLIYWASTRESGVPDRFSGSGSGTDFTLTISSLQAEDVAVYYCQQ |
| 1) | | YYSTPLTFGGGTKVEIKRTVAAPSVFIFPPSDEQLKSGTASVVCLLNN |
| | | FYPREAKVQWKVDNALQSGNSQESVIEQDSKDSTYSLSSILTLSKADY |
| | | EKHKVYACEVTHQGLSSPVTKSFNRGEC (SEQ ID NO: 2768) |
| | HC | EVQLLESGGGLVQPGGSLRLSCAASGFTFSSYAMSWVRQAPGKGLEWV |
| | | SAISGSGGSTYYAESVKGRFTISRDNSKNTLYLQMNSLRAEDTAVYYC |
| | | AKAYIPMAFFDYWGQGTLVIVSSASTKGPSVFPLAPSSKSTSGGTAAL |
| | | GCLVKDYFPEPVTVSWNSGALTSGVHTFPAVLQSSGLYSLSSVVTVPS |
| | | SSLGTQTYICNVNHKPSNTKVDKKVEPKSCDKTHTCPPCPAPELLGGP |
| | | SVFLFPPKPKDTLMISRTPEVTCVVVDVSHEDPEVKFNWYVDGVEVHN |
| | | AKTKPCEEQYGSTYRCVSVLTVLHQDWLNGKEYKCKVSNKALPAPIEK |
| | | TISKAKGQPREPQVYTLPPSREEMTKNQVSLICLVKGFYPSDIAVEWE |
| | | SNGQPENNYKTTPPVLDSDGSFFLYSKLTVDKSRWQQGNVFSCSVMHE |
| | | ALHNHYTQKSLSLSPGK (SEQ ID NO: 2769) |
| 24G6-1 | LC | DIVMTQSPDSLAVSLGERATINCKSSQSVLYSSNNKHFLAWYQQKPGQ |
| (SST28347- | | PPKLLIYWASTRESGVPDRFSGSGSGTDFTLTISSLQAEDVAVYYCQQ |
| 1) | | YYSTPLTFGGGTKVEIKRTVAAPSVFIFPPSDEQLKSGTASVVCLLNN |
| | | FYPREAKVQWKVDNALQSGNSQESVIEQDSKDSTYSLSSILTLSKADY |
| | | EKHKVYACEVTHQGLSSPVTKSFNRGEC (SEQ ID NO: 2768) |
| | HC | EVQLLESGGGLVQPGGSLRLSCAASGFTFSSYAMSWVRQAPGKGLEWV |
| | | SAISGSGGSTYYAESVKGRFTISRDNSKNTLYLQMNSLRAEDTAVYYC |
| | | AKAYIPMAFFDYWGQGTLVIVSSASTKGPSVFPLAPSSRSTSESTAAL |
| | | GCLVKDYFPEPVTVSWNSGALTSGVHTFPAVLQSSGLYSLSSVVTVPS |
| | | SNFGTQTYTCNVDHKPSNTKVDKTVERKCCVECPPCPAPELLGGPSVF |
| | | LFPPKPKDTLMISRTPEVTCVVVDVSHEDPEVKFNWYVDGVEVHNAKT |
| | | KPCEEQYGSTYRCVSVLTVLHQDWLNGKEYKCKVSNKALPAPIEKTIS |
| | | KAKGQPREPQVYTLPPSREEMTKNQVSLICLVKGFYPSDIAVEWESNG |
| | | QPENNYKTTPPVLDSDGSFFLYSKLTVDKSRWQQGNVFSCSVMHEALH |
| | | NHYTQKSLSLSPG (SEQ ID NO: 2770) |
| 6E7-1 | LC | DIQMTQSPSSVSASVGDRVTITCRASQGISSWLAWYQQKPGKAPKLLI |
| (SST29857- | | YAASSLQSGVPSRFSGSGSGTDFTLTISSLQPEDFATYFCQQADAFPR |
| 1) | | TFGQGTKLEIKRTVAAPSVFIFPPSDEQLKSGTASVVCLLNNFYPREA |
| | | KVQWKVDNALQSGNSQESVIEQDSKDSTYSLSSILTLSKADYEKHKVY |
| | | ACEVTHQGLSSPVTKSFNRGEC (SEQ ID NO: 2771) |
| | HC | EVQLVQSGAEVKKPGESLKISCKGSGYSFTSYWIAWVRQMPGKGLEWM |
| | | GIIYPGDADARYSPSFQGQVTISADKSISTAYLQWSSLKASDTAMYFC |
| | | ARQRTFYYDSSDYFDYWGQGTLVTVSSASTKGPSVFPLAPSSRSTSES |
| | | TAALGCLVKDYFPEPVTVSWNSGALTSGVHTFPAVLQSSGLYSLSSVV |
| | | TVPSSNFGTQTYTCNVDHKPSNTKVDKTVERKCCVECPPCPAPELLGG |
| | | PSVFLFPPKPKDTLMISRTPEVTCVVVDVSHEDPEVKFNWYVDGVEVH |
| | | NAKTKPCEEQYGSTYRCVSVLTVLHQDWLNGKEYKCKVSNKALPAPIE |
| | | KTISKAKGQPREPQVYTLPPSREEMTKNQVSLICLVKGFYPSDIAVEW |
| | | ESNGQPENNYKTTPPVLDSDGSFFLYSKLTVDKSRWQQGNVFSCSVMH |
| | | EALHNHYTQKSLSLSPG (SEQ ID NO: 2772) |
| 13E7-1 | LC | EIVMTQSPATLSVSPGERATLSCRASQSVSSNLAWFQQKPGQAPRLLI |
| (SST202443- | | YGASTRATGIPARFSGSGSGTEFTLTISSLQPEDFAVYYCLQDNNFPP |
| 1) | | TFGQGTKVDIKRTVAAPSVFIFPPSDEQLKSGTASVVCLLNNFYPREA |
| | | KVQWKVDNALQSGNSQESVIEQDSKDSTYSLSSILTLSKADYEKHKVY |
| | | ACEVTHQGLSSPVTKSFNRGEC (SEQ ID NO: 2773) |
| | HC | EVQLVQSGAEVKKPGESLKISCKGSGYSFTSYWIGWVRQMPGKGLEWM |
| | | GIIYPGDADARYSPSFQGQVTISADKSISTAYLQWSSLKASDTAMYFC |
| | | ARRRQGIFGDALDFWGQGTLVTVSSASTKGPSVFPLAPSSKSTSGGTA |
| | | ALGCLVKDYFPEPVTVSWNSGALTSGVHTFPAVLQSSGLYSLSSVVTV |
| | | PSSSLGTQTYICNVNHKPSNTKVDKKVEPKSCDKTHTCPPCPAPELLG |
| | | GPSVFLFPPKPKDTLMISRTPEVTCVVVDVSHEDPEVKFNWYVDGVEV |
| | | HNAKTKPCEEQYGSTYRCVSVLTVLHQDWLNGKEYKCKVSNKALPAPI |
| | | EKTISKAKGQPREPQVYTLPPSREEMTKNQVSLICLVKGFYPSDIAVE |
| | | WESNGQPENNYKTTPPVLDSDGSFFLYSKLTVDKSRWQQGNVFSCSVM |
| | | HEALHNHYTQKSLSLSPG (SEQ ID NO: 2774) |
| 5E3-1 | LC | DIQMTQSPSSLSASVGDRVTITCRASQGISNYLAWYQQKPGKAPKSLI |
| (SST29825- | | YAASSLQSGVPSRFSGSGSGTDFTLTISSLQPEDFATYYCQQYSTYPF |
| 1) | | TFGQGTKVDIKRTVAAPSVFIFPPSDEQLKSGTASVVCLLNNFYPREA |
| | | KVQWKVDNALQSGNSQESVIEQDSKDSTYSLSSILTLSKADYEKHKVY |
| | | ACEVTHQGLSSPVTKSFNRGEC (SEQ ID NO: 2775) |
| | HC | QVQLVQSGAEVKKPGASVKVSCKASGYTFTGYYIHWVRQAPGQGLEWM |
| | | GWINPYSGGTTSAQKFQGRVTMTRDTSTSSAYMELSRLRSDDTAVYYC |
| | | ARDAGYLALYGTDVWGQGTLVTVSSASTKGPSVFPLAPSSRSTSESTA |
| | | ALGCLVKDYFPEPVTVSWNSGALTSGVHTFPAVLQSSGLYSLSSVVTV |
| | | PSSNFGTQTYTCNVDHKPSNTKVDKTVERKCCVECPPCPAPELLGGPS |
| | | VFLFPPKPKDTLMISRTPEVTCVVVDVSHEDPEVKFNWYVDGVEVHNA |
| | | KTKPCEEQYGSTYRCVSVLTVLHQDWLNGKEYKCKVSNKALPAPIEKT |
| | | ISKAKGQPREPQVYTLPPSREEMTKNQVSLTCLVKGFYPSDIAVEWES |
| | | NGQPENNYKTTPPVLDSDGSFFLYSKLTVDKSRWQQGNVFSCSVMHEA |
| | | LHNHYTQKSLSLSPG (SEQ ID NO: 2776) |
| 13E7 | LC | EIVMTQSPATLSVSPGERATLSCRASQSVSSNLAWFQQKPGQAPRLLI |
| Variant | | YGASTRATGIPARFSGSGSGTEFTLTISSLQPEDFAVYYCLQDNNFPP |
| | | TFGQGTKVDIKRTVAAPSVFIFPPSDEQLKSGTASVVCLLNNFYPREA |
| | | KVQWKVDNALQSGNSQESVIEQDSKDSTYSLSSILTLSKADYEKHKVY |
| | | ACEVTHQGLSSPVTKSFNRGEC (SEQ ID NO: 2777) |
| | HC | EVQLVQSGAEVKKPGESLKISCKGSGYSFTSYWIGWVRQMPGKGLEWM |
| | | GIIYPGDADARYSPSFQGQVTISADKSISTAYLQWSSLKASDTAMYFC |
| | | ARRRQGIFGDALDFWGQGTLVTVSSASTKGPSVFPLAPSSKSTSGGTA |
| | | ALGCLVKDYFPEPVTVSWNSGALTSGVHTFPAVLQSSGLYSLSSVVTV |
| | | PSSSLGTQTYICNVNHKPSNTKVDKKVEPKSCDKTHTCPPCPAPELLG |
| | | GPSVFLFPPKPKDTLMISRTPEVTCVVVDVSHEDPEVKFNWYVDGVEV |
| | | HNAKTKPCEEQYGSTYRCVSVLTVLHQDWLNGKEYKCKVSNKALPAPI |
| | | EKTISKAKGQPREPQVYTLPPSREEMTKNQVSLICLVKGFYPSDIAVE |
| | | WESNGQPENNYKTTPPVLDSDGSFFLYSKLTVDKSRWQQGNVFSCSVM |
| | | HEALHNHYTQKSLSLSPGK (SEQ ID NO: 2778) |

[0292] In some embodiments, the TREM2 agonist antigen binding proteins of the invention comprise a light chain comprising the sequence of SEQ ID NO: 334 and a heavy chain comprising the sequence of SEQ ID NO: 335. In some embodiments, the TREM2 agonist antigen binding proteins of the invention comprise a light chain comprising the sequence of SEQ ID NO: 334 and a heavy chain comprising the sequence of SEQ ID NO: 336. In some embodiments, the TREM2 agonist antigen binding proteins of the invention comprise a light chain comprising the sequence of SEQ ID NO: 337 and a heavy chain comprising the sequence of SEQ ID NO: 338. In some embodiments, the TREM2 agonist antigen binding proteins of the invention comprise a light chain comprising the sequence of SEQ ID NO: 339 and a heavy chain comprising the sequence of SEQ ID NO: 340. In some embodiments, the TREM2 agonist antigen binding proteins of the invention comprise a light chain comprising the sequence of SEQ ID NO: 341 and a heavy chain comprising the sequence of SEQ ID NO: 342. In some embodiments, the TREM2 agonist antigen binding proteins of the invention comprise a light chain comprising the sequence of SEQ ID NO: 2768 and a heavy chain comprising the sequence of SEQ ID NO: 2769. In some embodiments, the TREM2 agonist antigen binding proteins of the invention comprise a light chain comprising the sequence of SEQ ID NO: 2768 and a heavy chain comprising the sequence of SEQ ID NO: 2770. In some embodiments, the TREM2 agonist antigen binding proteins of the invention comprise a light chain comprising the sequence of SEQ ID NO: 2771 and a heavy chain comprising the sequence of SEQ ID NO: 2772. In some embodiments, the TREM2 agonist antigen binding proteins of the invention comprise a light chain comprising the sequence of SEQ ID NO: 2773 and a heavy chain comprising the sequence of SEQ ID NO: 2774. In some embodiments, the TREM2 agonist antigen binding proteins of the invention comprise a light chain comprising the sequence of SEQ ID NO: 2775 and a heavy chain comprising the sequence of SEQ ID NO: 2776.

[0293] In some embodiments, the present invention provides a method of treating ALSP in a human patient, the method comprising administering to the patient an effective amount of a TREM2 agonist antigen binding protein comprising a light chain comprising the sequence of SEQ ID NO: 334 and a heavy chain comprising the sequence of SEQ ID NO: 335. In some embodiments, the present invention provides a method of treating ALSP in a human patient, the method comprising administering to the patient an effective amount of a TREM2 agonist antigen binding protein comprising a light chain comprising the sequence of SEQ ID NO: 334 and a heavy chain comprising the sequence of SEQ ID NO: 336. In some embodiments, the present invention provides a method of treating ALSP in a human patient, the method comprising administering to the patient an effective amount of a TREM2 agonist antigen binding protein comprising a light chain comprising the sequence of SEQ ID NO: 337 and a heavy chain comprising the sequence of SEQ ID NO: 338. In some embodiments, the present invention provides a method of treating ALSP in a human patient, the method comprising administering to the patient an effective amount of a TREM2 agonist antigen binding protein comprising a light chain comprising the sequence of SEQ ID NO: 339 and a heavy chain comprising the sequence of SEQ ID NO: 340. In some embodiments, the present invention provides a method of treating ALSP in a human patient, the method comprising administering to the patient an effective amount of a TREM2 agonist antigen binding protein comprising a light chain comprising the sequence of SEQ ID NO: 341 and a heavy chain comprising the sequence of SEQ ID NO: 342. In some embodiments, the present invention provides a method of treating ALSP in a human patient, the method comprising administering to the patient an effective amount of a TREM2 agonist antigen binding protein comprising a light chain comprising the sequence of SEQ ID NO: 2768 and a heavy chain comprising the sequence of SEQ ID NO: 2769. In some embodiments, the present invention provides a method of treating ALSP in a human patient, the method comprising administering to the patient an effective amount of a TREM2 agonist antigen binding protein comprising a light chain comprising the sequence of SEQ ID NO: 2768 and a heavy chain comprising the sequence of SEQ ID NO: 2770. In some embodiments, the present invention provides a method of treating ALSP in a human patient, the method comprising administering to the patient an effective amount of a TREM2 agonist antigen binding protein comprising a light chain comprising the sequence of SEQ ID NO: 2771 and a heavy chain comprising the sequence of SEQ ID NO: 2772. In some embodiments therefore, the present invention provides a method of treating ALSP in a human patient, the method comprising administering to the patient an effective amount of a TREM2 agonist antigen binding protein comprising a light chain comprising the sequence of SEQ ID NO: 2773 and a heavy chain comprising the sequence of SEQ ID NO: 2774. In some embodiments, the present invention provides a method of treating ALSP in a human patient, the method comprising administering to the patient an effective amount of a TREM2 agonist antigen binding protein comprising a light chain comprising the sequence of SEQ ID NO: 2775 and a heavy chain comprising the sequence of SEQ ID NO: 2776. In some embodiments, the present invention provides a method of treating ALSP in a human patient, the method comprising administering to the patient an effective amount of a TREM2 agonist antigen binding protein comprising a light chain comprising the sequence of SEQ ID NO: 2777 and a heavy chain comprising the sequence of SEQ ID NO: 2778.

[0294] In some embodiments, the TREM2 agonist antigen binding proteins of the invention comprise a light chain consisting of or consisting essentially of the amino acid sequence of SEQ ID NO: 334, 337, 339 or 341. In some embodiments, the TREM2 agonist antigen binding proteins of the invention comprise a light chain consisting of or consisting essentially of the amino acid sequence of SEQ ID NO: 2768, 2771, 2773, or 2775. In some embodiments, the TREM2 agonist antigen binding proteins of the invention comprise a heavy chain consisting of or consisting essentially of the amino acid sequence of SEQ ID NO: 335, 336, 338, 340, or 342. In some embodiments, the TREM2 agonist antigen binding proteins of the invention comprise a heavy chain consisting of or consisting essentially of the amino acid sequence of SEQ ID NO: 2769, 2770, 2772, 2774, or 2776. In a specific embodiment, the TREM2 agonist antigen binding proteins of the invention comprise a light chain and a heavy chain, wherein:
[0295] (a) the light chain consisting of or consisting essentially of the amino acid sequence of SEQ ID NO: 334 and the heavy chain consisting of or consisting essentially of the amino acid sequence of SEQ ID NO: 335;
[0296] (b) the light chain consisting of or consisting essentially of the amino acid sequence of SEQ ID NO: 334 and the heavy chain consisting of or consisting essentially of the amino acid sequence of SEQ ID NO: 336;
[0297] (c) the light chain consisting of or consisting essentially of the amino acid sequence of SEQ ID NO: 337 and the heavy chain consisting of or consisting essentially of the amino acid sequence of SEQ ID NO: 338;
[0298] (d) the light chain consisting of or consisting of essentially of the amino acid sequence of SEQ ID NO: 339 and the heavy chain consisting of or consisting essentially of the amino acid sequence of SEQ ID NO: 340; or
[0299] (e) the light chain consisting of or consisting essentially of the amino acid sequence of SEQ ID NO: 341 and the heavy chain consisting of or consisting essentially of the amino acid sequence of SEQ ID NO: 342.

[0300] In a specific embodiment, the TREM2 agonist antigen binding proteins of the invention comprise a light chain and a heavy chain, wherein:
[0301] (a) the light chain consisting of or consisting essentially of the amino acid sequence of SEQ ID NO: 2768 and the heavy chain consisting of or consisting essentially of the amino acid sequence of SEQ ID NO: 2769;
[0302] (b) the light chain consisting of or consisting essentially of the amino acid sequence of SEQ ID NO: 2768 and the heavy chain consisting of or consisting essentially of the amino acid sequence of SEQ ID NO: 2770;
[0303] (c) the light chain consisting of or consisting essentially of the amino acid sequence of SEQ ID NO: 2771 and the heavy chain consisting of or consisting essentially of the amino acid sequence of SEQ ID NO: 2772;
[0304] (d) the light chain consisting of or consisting of essentially of the amino acid sequence of SEQ ID NO: 2773 and the heavy chain consisting of or consisting essentially of the amino acid sequence of SEQ ID NO: 2774;
[0305] (e) the light chain consisting of or consisting essentially of the amino acid sequence of SEQ ID NO: 2775 and the heavy chain consisting of or consisting essentially of the amino acid sequence of SEQ ID NO: 2776; or
[0306] (f) the light chain consisting of or consisting essentially of the amino acid sequence of SEQ ID NO: 2777 and the heavy chain consisting of or consisting essentially of the amino acid sequence of SEQ ID NO: 2778.

[0307] Unless indicated otherwise by reference to a specific sequence in Tables 1A, 1B, 3A, 3B, 3C, 3D, 3E and in related discussions, the numbering of the amino acid residues in an immunoglobulin heavy chain or light chain is according to Kabat-EU numbering as described in Kabat et al., Sequences of Proteins of Immunological Interest, 5th Ed., US Department of Health and Human Services, NIH publication No. 91-3242, pp 662,680,689 (1991) and Edelman et al., Proc. Natl. Acad. USA, Vol. 63: 78-85 (1969). The Kabat numbering scheme is typically used when referring to the position of an amino acid within the variable regions, whereas the EU numbering scheme is generally used when referring to the position of an amino acid with an immunoglobulin constant region.

[0308] In some embodiments, the TREM2 antigen binding protein comprise an antibody that competes with an antibody comprising CDRL1, CDRL2, CDRL3 or light chain variable region disclosed in Tables 1A, 3A, 3C and 3E, and a heavy chain variable region disclosed in Tables 1B, 3B, 3D and 3E. In some embodiments, a suitable assay for detecting competitive binding employs kinetic sensors used with Octet® systems (Pall ForteBio), which measures binding interactions using bio-layer interferometry methodology. One group of antibodies, antibodies 10E3, 13E7, 24F4, 4C5, 4G10, 32E3, and 6E7, competed with each other for binding to human TREM2, indicating that they share the same or similar epitope on human TREM2. Antibodies 16B8, 26A10, 26C10, 26F2, 33B12, and 5E3 compete with each other for TREM2 binding, but does not compete with antibodies in the first group or antibodies 24A10, 24G6, or 25F12, indicating that this second group of antibodies bind to a distinct epitope on human TREM2. Antibodies 24A10 and 24G6 share a similar epitope on human TREM2 as these two antibodies compete with each other for human TREM2 binding, but did not compete with any other antibody. Antibody 25F12 did not compete with any of the other tested antibodies for human TREM2 binding, indicating that this antibody binds to yet another epitope.

[0309] In some embodiments, a TREM2 agonist antigen binding protein competes with a reference antibody for binding to human TREM2, wherein the reference antibody comprises a light chain variable region comprising a sequence selected from SEQ ID NOs: 46-63 and a heavy chain variable region comprising a sequence selected from SEQ ID NOs: 110-126. In other embodiments, a TREM2 agonist antigen binding protein of the invention competes with a reference antibody for binding to human TREM2, wherein the reference antibody comprises a light chain variable region comprising a sequence selected from SEQ ID NOs: 153-162 and a heavy chain variable region comprising a sequence selected from SEQ ID NOs: 180-190. In still other embodiments, a TREM2 agonist antigen binding protein of the invention competes with a reference antibody for binding to human TREM2, wherein the reference antibody comprises a light chain variable region comprising a sequence selected from SEQ ID NOs: 61 and 295-300 and a heavy chain variable region comprising a sequence selected from SEQ ID NOs: 124 and 307-312. In certain embodiments, a TREM2 agonist antigen binding protein of the invention competes for binding to human TREM2 with one or more of the anti-TREM2 antibodies described herein, including 12G10, 26A10, 26C10, 26F2, 33B12, 24C12, 24G6, 24A10, 10E3, 13E7, 14C12, 25F12, 32E3, 24F4, 16B8, 4C5, 6E7, 5E3, 4G10, V3, V9, V10, V23, V24, V27, V30, V33, V40, V44, V48, V49, V52, V57, V60, V68, V70, V73, V76, V83, V84, and V90.

[0310] In some embodiments, the TREM2 agonist antigen binding protein competes with a reference antibody for binding to human TREM2, wherein the reference antibody comprises a light chain variable region comprising the sequence of SEQ ID NO: 61 and a heavy chain variable region comprising the sequence of SEQ ID NO: 124. In such embodiments, antigen binding proteins that compete with this reference antibody for binding to human TREM2 would bind the same or similar epitope as antibody 6E7 or any of the other antibodies 10E3, 13E7, 24F4, 4C5, 4G10, and 32E3.

[0311] In some embodiments, the TREM2 agonist antigen binding protein competes with a reference antibody for binding to human TREM2, wherein the reference antibody comprises a light chain variable region comprising the sequence of SEQ ID NO: 62 and a heavy chain variable region comprising the sequence of SEQ ID NO: 125. In such embodiments, antigen binding proteins that compete with this reference antibody for binding to human TREM2 would bind the same or similar epitope as antibody 5E3 or any of the other antibodies 16B8, 26A10, 26C10, 26F2, and 33B12.

[0312] In some embodiments, the TREM2 agonist antigen binding protein competes with a reference antibody for binding to human TREM2, wherein the reference antibody comprises a light chain variable region comprising the sequence of SEQ TD NO: 52 and a heavy chain variable region comprising the sequence of SEQ TD NO: 115. In such embodiments, antigen binding proteins that compete with this reference antibody for binding to human TREM2 would bind the same or similar epitope as antibody 24G6 or antibody 24A10.

[0313] In some embodiments, the TREM2 agonist antigen binding protein competes with a reference antibody for binding to human TREM2, wherein the reference antibody comprises a light chain variable region comprising the sequence of SEQ TD NO: 56 and a heavy chain variable region comprising the sequence of SEQ TD NO: 119. In such embodiments, antigen binding proteins that compete with this reference antibody for binding to human TREM2 would bind the same or similar epitope as antibody 25F12.

[0314] In some embodiments, isolated nucleic acids encoding the anti-TREM2 binding domain of the antigen binding proteins of the invention can be used to synthesize the antigen binding protein or used to generate variants. In some embodiments, the polynucleotide may comprise a nucleotide sequence that is at least 80% identical, at least 9000 identical, at least 950% identical, or at least 98% identical to any of the nucleotide sequences listed in Table 3G.

TABLE 3G
Exemplary Anti-TREM2 Antibody Variable Region Nucleic Acid Sequences

| | | | |
|---|---|---|---|
| | VL or | | |
| | VH Group | | SEQ |
| Ab | Desig- | | ID |
| ID. | nation | Nucleic Acid Sequence | NO: |

Light chain variable regions

| | | | |
|---|---|---|---|
| 12G10 | LV-01 | CAGGCTGTGCCGACTCAGCCGTCTTCCCTCTCTGCATCTCCTGGAGTATT | 208 |
| | | AGCCAGTCTCACCTGCACCTTACGCAGTGGCATCAATGTTGGTACCTACA | |
| | | GGATATACTGGTACCAGCAGAAGCCAGGGAGTCCTCCCCAGTATCTCCTG | |
| | | AGGTACAAATCAGACTCAGATAAGCAGCAGGGCTCTGGAGTCCCCAGCCG | |
| | | CTTCTCTGGATCCAAGGATGCTTCGGCCAATGCAGGGATTTTACTCATCT | |
| | | CTGGGCTCCAGTCTGAGGATGAGGCTGACTATTACTGTATGATTTGGTAC | |
| | | AGCAGTGCTGTGGTATTCGGCGGAGGGACCAAACTGACCGTCCTA | |
| 26A10 | LV-02 | TCCTATGAGCTGACTCAGCCACCCTCAGTGTCCGTGTCCCCAGGACAGAC | 209 |
| | | AGCCAGCATCACCTGCTCTGGAGATAAATTGGGAGATAAGTATGTTTGCT | |
| | | GGTATCAGCAGAAGCCAGGCCAGTCCCCTGTGCTGGTCATCTATCAAGAT | |
| | | AGCAAGCGGCCCTCAGGGATCCCTGAGCGATTCTCTGGCTCCAACTCTGG | |
| | | GAACACAGCCACTCTGACCATCAGCGGGACCCAGGCTATGGATGAGGCTG | |
| | | ACTATTACTGTCAGGCGTGGGACAGTAACACTGTGGTATTCGGCGGAGGG | |
| | | ACCAAGCTGACCGTCCTA | |
| 26C10 | LV-03 | TCCTTTGAGCTGACTCAGCCACCCTCAGTGTCCGTGTCCCCAGGACAGAC | 210 |
| | | AGCCAGCATCACCTGCTCTGGAGATAAATTGGGGGATAAGTATGTTTGCT | |
| | | GGTATCAGCAGAAGCCAGGCCAGTCCCCTATGTTGGTCATCTATCAAGAT | |
| | | ACCAAGCGGCCCTCAGGGATCCCTGAACGATTCTCTGGCTCCAACTCTGG | |
| | | GAACACAGCCACTCTGACCATCAGCGGGACCCAGGCTATGGATGAGGCTG | |
| | | ACTATTACTGTCAGGCGTGGGACAGCAGCACTGTGGTCTTCGGCGGAGGG | |
| | | ACCAAGCTGACCGTCCTA | |
| 26F2 | LV-04 | TCCTATGAGCTGACTCAGCCACCCTCAGTGTCCGTGTCCCCAGGACAGAC | 211 |
| | | AGCCAGCATCACCTGCTCTGGAGATAAATTGGGGGATAAGTATGTTTGCT | |
| | | GGTATCAGCAGAAGCCAGGCCAGTCCCCTGTGTTGGTCATCTTTCAAGAT | |
| | | AGCAAGCGGCCCTCAGGGATCCCTGAGCGATTCTCTGGCTCCAACTCTGG | |
| | | GAACACAGCCACTCTGACCATCAGCGGGACCCAGGCTATGGATGAGGCTG | |
| | | ACTATTACTGTCAGGCGTGGGACAGCAGCACTGTGGTATTCGGCGGAGGG | |
| | | ACCAAGCTGACCGTCCTA | |
| 33B12 | LV-05 | TCCTATGAGCTGACTCAGCCACCCTCAGTGTCCGTGTCCCCAGGACAGAC | 212 |
| | | AGCCAGCATCACCTGCTCTGGAGATAAATTGGGGGATAAGTATGTTTGCT | |
| | | GGTATCAGCAGAAGCCAGGCCAGTCCCCTGTGTTGGTCATCTATCAAGAT | |
| | | AGCAAGCGGCCCTCAGGGATCCCTGAGCGATTCTCTGGCTCCAACTCTGG | |
| | | GAACACAGCCACTCTGACCATCAGCGGGACCCAGGCTATGGATGAGGCTG | |
| | | ACTATTACTGTCAGGCGTGGGACAGTAGCACTGTGGTATTCGGCGGAGGG | |
| | | ACCAAGCTGACCGTCCTA | |
| 24C12 | LV-06 | GGCATCGTGATGACCCAGTCTCCAGACTCCCTGGCTGTGTCTCTGGGCGA | 213 |
| | | GAGGGCCACCATCAACTGCAAGTCCAGCCGGAGTGTTTTGTACAGCTCCA | |
| | | ACAATAAGAACTACTTAGCTTGGTACCAGCAGAAACCAGGACAGCCTCCT | |
| | | AAGGTGCTCATTTACTGGGCATCTACCCGGGAATCCGGGGTCCCTGACCG | |
| | | ATTCAGTGGCAGCGGGTCTGGGACAGATTTCACTCTCACCATCAGCAGCC | |
| | | TGCAGGCTGAAGATGTGGCAGTTTATAACTGTCAGCAATATTATATTACT | |
| | | CCGATCACCTTCGGCCAAGGGACACGACTGGAGATTAAA | |
| 24G6 | LV-07 | GACATCGTGATGACCCAGTCTCCAGACTCCCTGGCTGTGTCTCTGGGCGA | 214 |
| | | GAGGGCCACCATCAACTGCAAGTCCAGCCAGAGTGTTTTATACAGCTCCA | |
| | | ACAATAAGCACTTCTTAGCTTGGTACCAGCAGAAACCAGGACAGCCTCCT | |
| | | AAGCTGCTCATTTACTGGGCATCTACCCGGGAGTCCGGGGTCCCTGACCG | |
| | | ATTCAGTGGCAGCGGGTCTGGGACAGATTTCACTCTCACCATCAGCAGCC | |
| | | TGCAGGCTGAAGATGTGGCATTTTATTACTGTCAGCAATATTATAGTACT | |
| | | CCGCTCACTTTCGGCGGAGGGACCAAGGTGGAGATCAAA | |
| 24A10 | LV-08 | GACATCGTGATGACCCAGTCTCCAGACTCCCTGGCTGTGTCTCTGGGCGA | 215 |
| | | GAGGGCCACCATCACCTGCAAGTCCAGCCACAATGTTTTATACAGCTCCA | |
| | | ACAATAAGAACTACTTAGCTTGGTATCAGCAGAAACCAGGACAGCCTCCT | |
| | | AAACTGCTCATTTACTGGGCATCTACCCGGGAATCCGGGGTCCCTGACCG | |
| | | ATTCAGTGGCAGCGGGTCTGGGACAGATTTCACTCTCACCATCAGCAGCC | |
| | | TGCAGGCTGAAGATGTGGCAGTTTATTACTGTCACCAATATTATAGTACT | |
| | | CCGTGCAGTTTTGGCCAGGGGACCAAGCTGGAGATCAAA | |
| 10E3 | LV-09 | GAAATAGTGATGACGCAGTCTCCAGCCACCCTGTCTGTGTCTCCAGGGGA | 216 |
| | | AAGAGCCACCCTCTCCTGCAGGGCCAGTCAGAGTGTTAGCAGCAACTTAG | |
| | | CCTGGTTCCAGCAGAAACCTGGCCAGGCTCCCAGGCTCCTCATCTATGGT | |
| | | GCTTCCACCAGGGCCACTGGTATTCCAGCCAGGTTCAGTGTCAGTGGGTC | |
| | | TGGGACAGAGTTCACTCTCACCATCAGCAGCCTGCAGTCTGAAGATTTTG | |
| | | CATTTTATTACTGTCTGCAGGATAATAATTGGCCTCCCACTTTCGGCCCT | |
| | | GGGACCAAAGTGGATATCAAA | |
| 13E7 | LV-10 | GAAATAGTGATGACGCAGTCTCCAGCCACCCTGTCTGTGTCTCCAGGGGA | 217 |
| | | AAGAGCCACCCTCTCCTGCAGGGCCAGTCAGAGTGTTAGCAGCAACTTAG | |
| | | CCTGGTTCCAGCAGAAACCTGGCCAGGCTCCCAGGCTCCTCATCTATGGT | |
| | | GCTTCCACCAGGGCCACTGGTATTCCAGCCAGGTTCAGTGTCAGTGGGTC | |
| | | TGGGACAGAGTTCACTCTCACCATCAGCAGCCTGCAGTCTGAAGATTTTG | |
| | | CAGTTTATTACTGTCTGCAGGATAATAATTGGCCTCCCACTTTCGGCCCT | |
| | | GGGACCAAAGTGGATATCAAA | |
| 25E12 | LV-11 | GAAAAAGTGATGACGCAGTCTCCAGCCACCCTGTCTGTGTCTCCAGGGGA | 218 |
| | | AAGAGCCACCCTCTCCTGCAGGGCCAGTCAGAGTGTTAACAACAACTTAG | |
| | | CCTGGTACCAGCAGAAACCTGGCCAGGCTCCCAGGCTCCTCATCTATGGT | |
| | | GCATCCACCAGGGCCACTGGTATCCCAGCCAGGTTCAGTGGCAGTGGGTC | |
| | | TGGGACAGAGTTCACTCTCACCATCAGCAGCCTGCAGTCTGAAGATTTTG | |
| | | CAGTTTATTACTGTCAGCAGTATAATAACTGGCCTCGGACGTTCGGCCAA | |
| | | GGGACCAAGGTGGAAATCAAA | |
| 32E3 | LV-12 | GAATTTGTGTTGACGCAGTCTCCAGGCACCCTGTCTTTGTCTCCGGGGGA | 219 |
| | | AAGAGCCACCCTCTCCTGCAGGGCCAGTCAGATTATTAGCAGCAACTACT | |
| | | TAGCCTGGTACCAGCAGAAACCTGGCCAGGCTCCCAGGCTCCTCATCTAT | |
| | | AGTGCATCCAGCAGGGCCACTGGCATCCCAGACAGGTTCAGTGGCAGTGG | |
| | | GTCTGGGACAGACTTCACTCTCACCATCAGCAGACTGGAGCCTGAAGATT | |
| | | TTGCAGTGTATTACTGTCAGCAGTTTGATAGCTCACCGATCACCTTCGGC | |
| | | CGAGGGACACGACTGGACATTAAA | |
| 24F4 | LV-13 | GAAATTGTGTTGACGCAGTCTCCAGGCACCCTGTCTTTGTCTCCAGGGGA | 220 |
| | | AAGAGCCACCCTCTCCTGCAGGGCCAGTCAGAGTGTTAGCAGCAGCTACT | |
| | | TAGCCTGGTACCAGCAGAAACCTGGCCAGGCTCCCAGGCTCCTCATCTAT | |
| | | GGTGCATCCAGCAGGGCCACTGGCATCCCAGACAGGTTCAGTGGCAGTGG | |
| | | GTCTGGGACAGACTTCACTCTCACCATCAGCAGACTGGAGCCTGAAGATT | |
| | | TTGCACTGTATTACTGTCAGCAGTATGATACCTCACCATTCACTTTCGGC | |
| | | CCTGGGACCAAAGTGGATATCAAA | |
| 16B8 | LV-14 | GACATCCAGATGACCCAGTCTCCATCTTCCGTGTCTGCATCTGTAGGAGA | 221 |
| | | CAGAGTCACCGTCACTTGTCGGGCGAGTCAGGATATTAACAGCTGGTTAG | |
| | | CCTGGTATCAGCAGAAACCAGGGAAAGCCCCTAAGCTCCTGATCTATGCT | |
| | | GCATCCTCTTTGCAAACTGGGGTCCCTTCAAGGTTCAGCGGCAGTGGATC | |
| | | TGGGACAGATTTCACTCTCACCATCAGCAGCCTGCAGCCTGAAGATTTTG | |
| | | CAACTTACTCTTGTCAACAGTCTAACAGTTTCCCGATCACCTTCGGCCAA | |
| | | GGGACACGACTGGAGATTAAA | |
| 4C5 | LV-15 | GACATCCAGATGACCCAGTCTCCATCTTCCGTGTCTGCATCTGTAGGAGA | 222 |
| | | CAGAGTCACCATCACTTGTCGGGCGAGTCAGGGTATTAGCAACTGGTTAG | |
| | | CCTGGTATCAGCAGAAACCAGGGAAAGCCCCTAAGCTCCTGATCTATGCT | |
| | | GCATCCAGTTTGCAAGTTGGGGTCCCATTAAGGTTCAGCGGCAGTGGATC | |
| | | TGGGACAGATTTCACTCTCACCATCAGCAGCCTGCAGCCTGAAGATTTTG | |
| | | CAACTTACTATTGTCAACAGGCTGACAGTTTCCCTCGCAATTTTGGCCAG | |
| | | GGGACCAAGCTGGAGATCAAA | |
| 6E7 | LV-16 | GACATCCAGATGACCCAGTCTCCATCTTCCGTGTCTGCATCTGTAGGAGA | 223 |
| V9 | | CAGAGTCACCATCACTTGTCGGGCGAGTCAGGGTATTAGCAGCTGGTTAG | |
| V30 | | CCTGGTATCAGCAGAAACCAGGGAAAGCCCCTAAGCTCCTGATCTATGCT | |
| V33 | | GCATCCAGTTTGCAAAATGGGGTCCCATCAAGGTTCAGCGGCAGTGGATC | |
| V44 | | TGGGACAGATTTCACTCTCACCATCAGCAGCCTGCAGCCTGAAGATTTTG | |
| V68 | | CAACTTACTTTTGTCAACAGGCTGACAGTTTCCCTCGCACTTTTGGCCAG | |
| | | GGGACCAAGCTGGAGATCAAA | |
| 5E3 | LV-17 | GACATCCAGATGACCCAGTCTCCATCCTCACTGTCTGCATCTGTAGGAGA | 224 |
| | | CAGAGTCACCATCACTTGTCGGGCGAGTCAGGGCATTAGCAATTATTTAG | |
| | | CCTGGTTTCAGCAGAAACCAGGGAAAGCCCCTAAATCCCTGATCTATGCT | |
| | | GCATCCAGTTTGCAAAGTGGGGTCCCATCAAAGTTCAGCGGCAGTGGATC | |
| | | TGGGACAGATTTCACTCTCACCATCAGCAGCCTGCAGCCTGAAGATTTTG | |
| | | CAACTTATTACTGCCAACAGTATAGTACTTACCCATTCACTTTCGGCCCT | |
| | | GGGACCAAAGTGGATATCAAA | |
| 4G10 | LV-18 | GACATCCAGATGACCCAGTCTCCATCCTCCCTGTCTGCATCTGTAGGAGA | 225 |
| | | CAGAGTCACCATCACTTGCCGGGCAAGTCAGGGCATAAGAAATGATTTAG | |
| | | GCTGGTATCAGCAGAAACCAGGGAATGCCCCTAAGCGCCTGATCTATGCT | |
| | | GCATCCAGTTTGCCAAGTGGGGTCCCATCAAGGTTCAGCGGCAGTGGATC | |
| | | TGGGCCAGAATTCACTCTCACAATCAGCAGTCTGCAGCCTGAAGATTTTG | |
| | | CAACTTATTACTGTCTACAGCATAATAGTTACCCGTGGACGTTCGGCCAA | |
| | | GGGACCAAGGTGGAAATCACA | |
| V3 | LV-101 | GACATCCAGATGACCCAGTCTCCATCTTCCGTGTCTGCATCTGTAGGAGA | 226 |
| | | CAGAGTCACCATCACTTGTCGGGCGAGTCAGGGTATTAGCAGCTGGTTAG | |
| | | CCTGGTATCAGCAGAAACCAGGGAAAGCCCCTAAGCTCCTGATCTATGCT | |
| | | GCATCCAGTAGGCAAAATGGGGTCCCATCAAGGTTCAGCGGCAGTGGATC | |
| | | TGGGACAGATTTCACTCTCACCATCAGCAGCCTGCAGCCTGAAGATTTTG | |
| | | CAACTTACTTTTGTCAACAGGCTGACAGGTTCCCTCGCACTTTTGGCCAG | |
| | | GGGACCAAGCTGGAGATCAAA | |
| V24 | LV-102 | GACATCCAGATGACCCAGTCTCCATCTTCCGTGTCTGCATCTGTAGGAGA | 227 |
| | | CAGAGTCACCATCACTTGTCGGGCGAGTCAGGGTATTAGCAGCTGGTTAG | |
| | | CCTGGTATCAGCAGAAACCAGGGAAAGCCCCTAAGCTCCTGATCTATGCT | |
| | | GCATCCAGTTTGCAAAAGGGGGTCCCATCAAGGTTCAGCGGCAGTGGATC | |
| | | TGGGACAGATTTCACTCTCACCATCAGCAGCCTGCAGCCTGAAGATTTTG | |
| | | CAACTTACTTTTGTCAACAGGCTGACAGTTTCCCTCATACTTTTGGCCAG | |
| | | GGGACCAAGCTGGAGATCAAA | |
| V27 | LV-103 | GACATCCAGATGACCCAGTCTCCATCTTCCGTGTCTGCATCTGTAGGAGA | 228 |
| | | CAGAGTCACCATCACTTGTCGGGCGAGTCAGGGTATTAGCAGCTGGTTAG | |
| | | CCTGGTATCAGCAGAAACCAGGGAAAGCCCCTAAGCTCCTGATCTATGCT | |
| | | GCATCCAGTTTGCAACGTGGGGTCCCATCAAGGTTCAGCGGCAGTGGATC | |
| | | TGGGACAGATTTCACTCTCACCATCAGCAGCCTGCAGCCTGAAGATTTTG | |
| | | CAACTTACTTTTGTCAACAGGCTGACAGTTTCCCTCGCACTTTTGGCCAG | |
| | | GGGACCAAGCTGGAGATCAAA | |
| V40 | LV-104 | GACATCCAGATGACCCAGTCTCCATCTTCCGTGTCTGCATCTGTAGGAGA | 229 |
| | | CAGAGTCACCATCACTTGTCGGGCGAGTCAGGGTATTAGCAGCTGGTTAG | |
| | | CCTGGTATCAGCAGAAACCAGGGAAAGCCCCTAAGCTCCTGATCTATGCT | |
| | | GCATCCAGTTTGCAACTTGGGGTCCCATCAAGGTTCAGCGGCAGTGGATC | |
| | | TGGGACAGATTTCACTCTCACCATCAGCAGCCTGCAGCCTGAAGATTTTG | |
| | | CAACTTACTTTTGTCAACAGGCTGACCGTTTCCCTCGCACTTTTGGCCAG | |
| | | GGGACCAAGCTGGAGATCAAA | |
| V48 | LV-105 | GACATCCAGATGACCCAGTCTCCATCTTCCGTGTCTGCATCTGTAGGAGA | 230 |
| | | CAGAGTCACCATCACTTGTCGGGCGAGTCAGGGTATTAGCAGCTGGTTAG | |
| | | CCTGGTATCAGCAGAAACCAGGGAAAGCCCCTAAGCTCCTGATCTATGCT | |
| | | GCATCCAGTTTGCAAACGGGGGTCCCATCAAGGTTCAGCGGCAGTGGATC | |
| | | TGGGACAGATTTCACTCTCACCATCAGCAGCCTGCAGCCTGAAGATTTTG | |
| | | CAACTTACTTTTGTCAACAGGCTGACAGTTTGCCTCGCACTTTTGGCCAG | |
| | | GGGACCAAGCTGGAGATCAAA | |
| V49 | LV-106 | GACATCCAGATGACCCAGTCTCCATCTTCCGTGTCTGCATCTGTAGGAGA | 231 |
| | | CAGAGTCACCATCACTTGTCGGGCGAGTCAGGGTATTAGCAGCTGGTTAG | |
| | | CCTGGTATCAGCAGAAACCAGGGAAAGCCCCTAAGCTCCTGATCTATGCT | |
| | | GCATCCAGTCGGCAAAATGGGGTCCCATCAAGGTTCAGCGGCAGTGGATC | |
| | | TGGGACAGATTTCACTCTCACCATCAGCAGCCTGCAGCCTGAAGATTTTG | |
| | | CAACTTACTTTTGTCAACAGGCTGACAGTTATCCTCGCACTTTTGGCCAG | |
| | | GGGACCAAGCTGGAGATCAAA | |
| V52 | LV-107 | GACATCCAGATGACCCAGTCTCCATCTTCCGTGTCTGCATCTGTAGGAGA | 232 |
| | | CAGAGTCACCATCACTTGTCGGGCGAGTCAGGGTATTAGCAGCTGGTTAG | |
| | | CCTGGTATCAGCAGAAACCAGGGAAAGCCCCTAAGCTCCTGATCTATGCT | |
| | | GCATCCAGTTTGCAAAGGGGGGTCCCATCAAGGTTCAGCGGCAGTGGATC | |
| | | TGGGACAGATTTCACTCTCACCATCAGCAGCCTGCAGCCTGAAGATTTTG | |
| | | CAACTTACTTTTGTCAACAGGCTGACCGTTTCCCTCGCACTTTTGGCCAG | |
| | | GGGACCAAGCTGGAGATCAAA | |
| V60 | LV-108 | GACATCCAGATGACCCAGTCTCCATCTTCCGTGTCTGCATCTGTAGGAGA | 233 |
| | | CAGAGTCACCATCACTTGTCGGGCGAGTCAGGGTATTAGCAGCTGGTTAG | |
| | | CCTGGTATCAGCAGAAACCAGGGAAAGCCCCTAAGCTCCTGATCTATGCT | |
| | | GCATCCAGTTTGCAAAGGGGGGTCCCATCAAGGTTCAGCGGCAGTGGATC | |
| | | TGGGACAGATTTCACTCTCACCATCAGCAGCCTGCAGCCTGAAGATTTTG | |
| | | CAACTTACTTTTGTGGGCAGGCTGACAGTTTCCCTCGCACTTTTGGCCAG | |
| | | GGGACCAAGCTGGAGATCAAA | |
| V73 | LV-106 | GACATCCAGATGACCCAGTCTCCATCTTCCGTGTCTGCATCTGTAGGAGA | 234 |
| | | CAGAGTCACCATCACTTGTCGGGCGAGTCAGGGTATTAGCAGCTGGTTAG | |
| | | CCTGGTATCAGCAGAAACCAGGGAAAGCCCCTAAGCTCCTGATCTATGCT | |
| | | GCATCCAGTCGTCAAAATGGGGTCCCATCAAGGTTCAGCGGCAGTGGATC | |
| | | TGGGACAGATTTCACTCTCACCATCAGCAGCCTGCAGCCTGAAGATTTTG | |
| | | CAACTTACTTTTGTCAACAGGCTGACAGTTATCCTCGCACTTTTGGCCAG | |
| | | GGGACCAAGCTGGAGATCAAA | |
| V76 | LV-109 | GACATCCAGATGACCCAGTCTCCATCTTCCGTGTCTGCATCTGTAGGAGA | 235 |
| | | CAGAGTCACCATCACTTGTCGGGCGAGTCAGGGTATTAGCAGCTGGTTAG | |
| | | CCTGGTATCAGCAGAAACCAGGGAAAGCCCCTAAGCTCCTGATCTATGCT | |
| | | GCATCCAGTTTGCAAAAGGGGGTCCCATCAAGGTTCAGCGGCAGTGGATC | |
| | | TGGGAGAGATTTCACTCTCACCATCAGCAGCCTGCAGCCTGAAGATTTTG | |
| | | CAACTTACTTTTGTCAACAGGCTGACAGTTTCCCTCGCACTTTTGGCCAG | |
| | | GGGACCAAGCTGGAGATCAAA | |
| V84 | LV-110 | GACATCCAGATGACCCAGTCTCCATCTTCCGTGTCTGCATCTGTAGGAGA | 236 |
| | | CAGAGTCACCATCACTTGTCGGGCGAGTCAGGGTATTAGCAGCTGGTTAG | |
| | | CCTGGTATCAGCAGAAACCAGGGAAAGCCCCTAAGCTCCTGATCTATGGT | |
| | | GCATCCAGTTTGCAAAATGGGGTCCCATCAAGGTTCAGCGGCAGTGGATC | |
| | | TGGGACAGATTTCACTCTCACCATCAGCAGCCTGCAGCCTGAAGATTTTG | |
| | | CAACTTACTTTTGTCAACAGGCTGACAGTTTCCCGCGCACTTTTGGCCAG | |
| | | GGGACCAAGCTGGAGATCAAA | |
| V10 | LV-201 | GACATCCAGATGACCCAGTCTCCATCTTCCGTGTCTGCATCTGTAGGAGA | 313 |
| | | CAGAGTCACCATCACTTGTCGGGCGAGTCAGGGTATTAGCAGCTGGTTAG | |
| | | CCTGGTATCAGCAGAAACCAGGGAAAGCCCCTAAGCTCCTGATCTATTCT | |
| | | GCATCCAGTTTGCAAAATGGGGTCCCATCAAGGTTCAGCGGCAGTGGATC | |
| | | TGGGACAGATTTCACTCTCACCATCAGCAGCCTGCAGCCTGAAGATTTTG | |
| | | CAACTTACTTTTGTCAACAGGCTGACAGTTTCCCTCGCACTTTTGGCCAG | |
| | | GGGACCAAGCTGGAGATCAAA | |
| V23 | LV-202 | GACATCCAGATGACCCAGTCTCCATCTTCCGTGTCTGCATCTGTAGGAGA | 314 |
| | | CAGAGTCACCATCACTTGTCGGGCGAGTCAGGGTATTAGCAGCTGGTTAG | |
| | | CCTGGTATCAGCAGAAACCAGGGAAAGCCCCTAAGCTCCTGATCTATGCT | |
| | | GCATCCAGTTTGCAAAATGGGGTCCCATCAAGGTTCAGCGGCAGTGGATC | |
| | | TGGGACAGATTTCACTCTCACCATCAGCAGCCTGCAGCCTGAAGATTTTG | |
| | | CAACTTACTTTTGTCAACAGGCTGACAGTTTCCCTCTTACTTTTGGCCAG | |
| | | GGGACCAAGCTGGAGATCAAA | |
| V57 | LV-203 | GACATCCAGATGACCCAGTCTCCATCTTCCGTGTCTGCATCTGTAGGAGA | 315 |
| | | CAGAGTCACCATCACTTGTGCGGCGAGTCAGGGTATTAGCAGCTGGTTAG | |
| | | CCTGGTATCAGCAGAAACCAGGGAAAGCCCCTAAGCTCCTGATCTATGCT | |
| | | GCATCCAGTTTGCAAAATGGGGTCCCATCAAGGTTCAGCGGCAGTGGATC | |
| | | TGGGACAGATTTCACTCTCACCATCAGCAGCCTGCAGCCTGAAGATTTTG | |
| | | CAACTTACTTTTGTCAACAGGCTGACAGTTTCCCTCGCACTTTTGGCCAG | |
| | | GGGACCAAGCTGGAGATCAAA | |
| V70 | LV-204 | GACATCCAGATGACCCAGTCTCCATCTTCCGTGTCTGCATCTGTAGGAGA | 316 |
| | | CAGAGTCACCATCACTTGTCGGGCGAGTCAGGGTATTAGCAGCTGGTTAG | |
| | | CCTGGTATCAGCAGAAACCAGGGAAAGCCCCTAAGCTCCTGATCTATGCT | |
| | | GCAGGGAGTTTGCAAAATGGGGTCCCATCAAGGTTCAGCGGCAGTGGATC | |
| | | TGGGACAGATTTCACTCTCACCATCAGCAGCCTGCAGCCTGAAGATTTTG | |
| | | CAACTTACTTTTGTCAACAGGCTGACAGTTTCCCTCGCACTTTTGGCCAG | |
| | | GGGACCAAGCTGGAGATCAAA | |
| V83 | LV-205 | GACATCCAGATGACCCAGTCTCCATCTTCCGTGTCTGCATCTGTAGGAGA | 317 |
| | | CAGAGTCACCATCACTTGTCGGGCGAGTCAGGGTATTAGCAGCTGGTTAG | |
| | | CCTGGTATCAGCAGAAACCAGGGAAAGCCCCTAAGCTCCTGATCTATGCT | |
| | | GCATCCAGTTTGCAAAATGGGGTCCCATCAAGGTTCAGCGGCAGTGGATC | |
| | | TGGGACAGATTTCACTCTCACCATCAGCAGCCTGCAGCCTGAAGATTTTG | |
| | | CAACTTACTTTTGTCAACAGGCTGTGAGTTTCCCTCGCACTTTTGGCCAG | |
| | | GGGACCAAGCTGGAGATCAAA | |
| V90 | LV-206 | GACATCCAGATGACCCAGTCTCCATCTTCCGTGTCTGCATCTGTAGGAGA | 318 |
| | | CAGAGTCACCATCACTTGTCGGGCGAGTCAGGGTATTAGCAGATGGTTAG | |
| | | CCTGGTATCAGCAGAAACCAGGGAAAGCCCCTAAGCTCCTGATCTATGCT | |
| | | GCATCCAGTTTGCAAAATGGGGTCCCATCAAGGTTCAGCGGCAGTGGATC | |
| | | TGGGACAGATTTCACTCTCACCATCAGCAGCCTGCAGCCTGAAGATTTTG | |
| | | CAACTTACTTTTGTCAACAGGCTGACAGTTTCCCTCGCACTTTTGGCCAG | |
| | | GGGACCAAGCTGGAGATCAAA | |

Heavy chain variable regions

| | | | |
|---|---|---|---|
| 12G10 | HV-01 | GAGGTGCAGCTGTTGGAGTCTGGGGGAGGCTTGGTACAGCCTGGGGGGTC | 237 |
| 24C12 | | CCTGAGACTCTCCTGTGCAGCCTCTGGATTCACCTTTAGCAGCTATGCCA | |
| | | TGAGCTGGGTCCGCCAGGCTCCAGGGAAGGGGCTGGAGTGGGTCTCAGCT | |
| | | ATTGGTGGTGGTGGTGTTAGCACATACTGCGCAGACTCCGTGAAGGGCCG | |
| | | GTTCACCATCTCCAGAGACAATTCCAAGAATACGCTGTATCTGCAAATGA | |
| | | ACAGCCTGAGAGCCGAGGACACGGCCGTATATTACTGTGCGAAATTTTAT | |
| | | ATAGCAGTGGCTGGTTCTCACTTTGACTACTGGGGCCAGGGAACCCTGGT | |
| | | CACCGTCTCCTCA | |
| 26A10 | HV-02 | GAGGTGCAACTGGTGGAGTCTGGGGGAGCCTTGGTACAGCGGGGGGGGTC | 238 |
| | | CCTGAGACTCTCCTGTGCAGCCTCTAGATTCACCTTCAGTAGCTTTGGCA | |
| | | TGAGCTGGGTCCGCCAGGCTCCAGGGAAGGGGCTGGAGTGGGTTTCATAC | |
| | | ATTAGTAGTAGTAGTTTTACCATATATTACGCAGACTCTGTGAAGGGCCG | |
| | | ATTCACCATCTCCAGAGACAATGCCAAGAATTCATTCTATCTGCAAATGA | |
| | | ACAGCCTGAGAGACGAGGACACGGCTGTGTATTACTGTGCGAGAGAGGGG | |
| | | GGTCTTACTATGGTTCGGGGAGTCTCTTCCTACGGTTTGGACGTCTGGGG | |
| | | CCAAGGGACCACGGTCACCGTCTCCTCA | |
| 26C10 | HV-03 | GAGGTGCAACTGGTGGAGTCTGGGGGAGCCTTGGTACAGCCTGGGGGGTC | 239 |
| | | CCTGAGACTCTCCTGTGCAGCCTCTGGATTCACCTTCAGTAGCTTTGGCA | |
| | | TGAGCTGGGTCCGCCAGGCTCCAGGGAAGGGGCTGGAGTGGGTTTCATAC | |
| | | ATTAGTAGTAGTAGTTTTACCATATACTACGCAGACTCTGTGAAGGGCCG | |
| | | ATTCACCATCTCCAGAGACAATGCCAAGAATTCGTTCTATCTGCAAATGA | |
| | | ACAGCCTGAGAGACGAGGACACGGCTGTGTATTTCTGTGTGAGAGAGGGG | |
| | | GGTATAACTATGGTTCGGGGAGTCTCTTCCTACGGTATGGACGTCTGGGG | |
| | | CCAAGGGACCACGGTCACCGTCTCCTCA | |
| 26F2 | HV-04 | GAGGTGCAACTGGTGGAGTCTGGGGGAGCCTTGGTACAGCCTGGGGGGTC | 240 |
| | | CCTGAGACTCTCCTGTGCAGCCTCTGGATTCACCTTCAGTAGCTTTGGCA | |
| | | TGAGCTGGGTCCGCCAGGCTCCAGGGAAGGGGCTGGAGTGGATTTCATAC | |
| | | ATTAGTAGTAGTAGTTTTACCATATACTACGCAGACTCTGTGAAGGGCCG | |
| | | ATTCACCATCTCCAGAGACAATGCCAAGAATTCATTCTATCTGCAAATGA | |
| | | ACAGCCTGAGAGACGAGGACACGGCTGTGTATTTCTGTGCGAGAGAGGGG | |
| | | GGTATTACTATGGTTCGGGGAGTCTCTTCCTACGGTATGGACGTCTGGGG | |
| | | CCAAGGGACCACGGTCACCGTCTCCTCA | |
| 33B12 | HV-05 | GAGGTGCAACTGGTGGAGTCTGGGGGAGCCTTGGTACAGCCTGGGGGGTC | 241 |
| | | CCTGAGACTCTCCTGTGCAGCCTCTGGATTCACCTTCAGTAGCTTTGGCA | |
| | | TGAGCTGGGTCCGCCAGGCTCCAGGGAAGGGCCTGGAGTGGGTTTCATAC | |
| | | ATTAGTAAAAGTAGTTTTACCATATACTACGCAGACTCTGTGAAGGGCCG | |
| | | ATTCACCATCTCCAGAGACAATGCCAAGAATTCATTCTATCTGCAAATGA | |
| | | ACAGCCTGAGAGACGAGGACACGGCTGTGTATTACTGTGCGAGAGAGGGG | |
| | | GGTCTTACTATGGTTCGGGGAGTCTCTTCCTACGGTTTGGACGTCTGGGG | |
| | | CCAAGGGACCACGGTCACCGTCTCCTCA | |
| 24G6 | HV-06 | GAGGTGCAGCTGTTGGAGTCTGGGGGAGGCTTGGTACAGCCTGGGGGGTC | 242 |
| | | CCTGAGACTCTCCTGTGCAGCCTCTGGATTCACCTTTAGCAGCTATGCCA | |
| | | TGAGCTGGGTCCGCCAGGCTCCAGGGAAGGGACTGGAGTGGGTCTCAGCT | |
| | | ATTAGTGGTAGTGGTGGTAGCACATACTACGCAGACTCCGTGAAGGGCCG | |
| | | GTTCACCATCTCCAGAGACAATTCCAAGAACACGCTGTATCTGCAAATGA | |
| | | ACAGCCTGAGAGCCGAGGACACGGCCGTATATTACTGTGCGAAGGCGTAT | |
| | | ACACCTATGGCATTCTTTGACTACTGGGGCCAGGGAACCCTGGTCACCGT | |
| | | CTCCTCA | |
| 24A10 | HV-07 | GAGGTGCAGGTGTTGGAGTCTGGGGGAGGCTTGGTACAGCCTGGGGGGTC | 243 |
| | | CCTGAGACTCTCCTGTGCAGCCTCTGGATTCACCTTTAGCAACTATGCCA | |
| | | TGAGCTGGGTCCGCCAGGCTCCAGGGAAGGGGCTGGAGTGGGTCTCAGCT | |
| | | ATTAGTGGTAGTGGTGGTAGCACATACTACGCAGACTCCGTGAAGGGCCG | |
| | | GTTCACCATCTCCAGAGACAATTCCAAGAACACGCTGTATCTGCAAATGA | |
| | | ACAGCCTGAGAGCCGAGGACACGGCCGTATATTACTGTGCGAAAGGAGGG | |
| | | TGGGAGCTATTTTACTGGGGCCAGGGAACCCTGGTCACCGTCTCCTCA | |
| 10E3 | HV-08 | GAGGTGCAGCTGGTGCAGTCTGGAGCAGAGGTGAAAAAGCCCGGGGAGTC | 244 |
| | | TCTGATGATCTCCTGTAAGGGTTCTGGATACAGCTTTACCAACTACTGGA | |
| | | TCGGCTGGGTGCGCCAGATGCCCGGGAAAGGCCTGGAGTGGATGGGGATC | |
| | | ATCTATCCTGGAGACTCTGATACCAGATACAGCCCGTCCTTCCAAGGCCA | |
| | | GGTCACCATCTCAGCCGACAAGTCCATCAGCACCGCCTACCTGCAGTGGA | |
| | | GCAGCCTGAAGGCCTCGGACACCGCCATGTATTTCTGTGCGAGACGGAGA | |
| | | CAGGGGATCTGGGGTGATGCTCTTGATATCTGGGGCCAAGGGACATTGGT | |
| | | CACCGTCTCTTCA | |
| 13E7 | HV-09 | GAGGTGCAGCTGGTGCAGTCTGGAGCAGAGGTGAAAAAGCCCGGGGAGTC | 245 |
| | | TCTGATGATCTCCTGTAAGGGTTCTGGATACAGCTTTACCAGCTACTGGA | |
| | | TCGGCTGGGTGCGCCAGATGCCCGGGAAAGGCCTGGAGTGGATGGGGATC | |
| | | ATCTATCCTGGAGACTCTGATACCAGATACAGCCCGTCCTTCCAAGGCCA | |
| | | GGTCACCATCTCAGCCGACAAGTCCATCAGCACCGCCTACCTGCAGTGGA | |
| | | GCAGCCTGAAGGCCTCGGACACCGCCATGTATTTCTGTGCGAGACGGAGA | |
| | | CAGGGGATCTGGGGTGATGCTCTTGATTTCTGGGGCCAAGGGACATTGGT | |
| | | CACCGTCTCTTCA | |
| 25E12 | HV-10 | CAGGTGCAGCTACAGCAGTGGGGCGCAGGACTGTTGAAGCCTTCGGAGAC | 246 |
| | | CCTGTCCCTCACCTGCGCTGTCTATGGTGGGTCCTTCAGTAGTTACTACT | |
| | | GGAGCTGGATCCGCCAGCCCCCAGGGAAGGGGCTGGAGTGGATTGGGGAA | |
| | | ATCAATCATAGTGGAAACACCAACTACAACCCGTCCCTCAAGAGTCGAGT | |
| | | CACCATATCAGTAGACACGTCCAAGAACCAGTTCTCCCTGAAGCTGAGCT | |
| | | CTGTGACCGCCGCGGACACGGCTGTGTATTACTGTGCGAGAGAGGGGTAT | |
| | | TACGATATCTTGACTGGTTATCATGATGCTTTTGATATTTGGGACCAAGG | |
| | | GACAATGGTCACCGTNTTTTCA | |
| 32E3 | HV-11 | GAGGTGCAGCTGGTGCAGTCTGGAGCAGAGGTGAAAAAGCCCGGGGAGTC | 247 |
| | | TCTGAAGATCTCCTGTAAGGGTTCTGGATACAGCTTTACCAGCTACTGGA | |
| | | TCGGCTGGGTGCGCCAGATGCCCGGGAAAGGCCTGGAGTGGATGGGGATC | |
| | | ATCTATCCTGGTGACTCTGATACCAGATACAGCCCGTCCTTCCAAGGCCA | |
| | | GGTCACCATCTCAGCCGACAAGTCCATCAGCACCGCCTACCTGCAGTGGA | |
| | | GCACCCTGAAGGCCTCGGACACCGCCATATATTACTGTGCGCGACATGAC | |
| | | ATTATACCAGCAGCCCCTGGTGCTTTTGATATCTGGGGCCAAGGGACAAT | |
| | | GGTCACCGTCTCTTCA | |
| 24F4 | HV-12 | GAGGTGCAGCTGGTGCAGTCTGGAGCAGAGGTGAAAAAGCCCGGGGAGTC | 248 |
| | | TCTGAAGATCTCCTGTAAGGGTTCTGGATACACCTTTACCAGCTACTGGA | |
| | | TCGGCTGGGTGCGCCAGATGCCCGGGAAAGGCCTGGAGTGGATGGGGATC | |
| | | ATCTATCCTGGTGACTCTGATACCAGATACAGCCCGTCCTTCCAAGGCCA | |
| | | GGTCACCATCTCAGTCGACAAGTCCAGCAGCACCGCCTACCTGCAGTGGA | |
| | | GCAGCCTGAAGGCCTCGGACACCGCCATATATTACTGTACGAGACAGGCC | |
| | | ATAGCAGTGACTGGTTTGGGGGGTTTCGACCCCTGGGGCCAGGGAACCCT | |
| | | GGTCACCGTCTCCTCA | |
| 16B8 | HV-13 | CAGGTTCAGCTGGTGCAGTCTGGAGCTGAGGTGAAGAAGCCTGGGGCCTC | 249 |
| | | AGTGAAGGTCTCCTGCAAGGCTTCTGGTTACACCTTTACCAACTATGGTA | |
| | | TCAGCTGGGTGCGACAGGCCCCTGGACAAGGGCTTGAGTGGATGGGATGG | |
| | | ATCAGCGCTTACAATGGTAACACAAACTATGCACAGAAGCTCCAGGGCAG | |
| | | AGTCACCATGACCACAGACACATCCACGAGTACAGTCTACATGGAGCTGA | |
| | | GGAGCCTGAGATCTGACGACACGGCCGTGTATTACTGTGCGAGACGGGGA | |
| | | TACAGCTATGGTTCCTTTGACTACTGGGGCCAGGGAACCCTGGTCACCGT | |
| | | CTCCTCA | |
| 4C5 | HV-14 | GAGGTGCAGCTGGTGCAGTCTGGAGCAGAAGTGAAAAAGCCCGGGGAGTC | 250 |
| | | TCTGAAGATCTCCTGTAAGGGTTCTGGACACAGTTTTACCAACTACTGGA | |
| | | TCGCCTGGGTGCGCCAGATGCCCGGGAAAGGCCTGGAGTGGATGGGGATC | |
| | | ATCTATCCTGGTGACTCTGATACCAGATACAGCCCGTCCTTCCAAGGCCA | |
| | | GGTCACCATCTCAGCCGACAAGTCCATCAGCACCGCCTACCTGCAGTGGA | |
| | | GCAGCCTGAAGGCCTCGGACACCGCCGTGTATTTCTGTGCGAGACAAAGG | |
| | | ACGTTTTACTATGATAGTAGTGGTTATTTTGACTACTGGGGCCAGGGAAC | |
| | | CCTGGTCACCGTCTCCTCA | |
| 6E7 | HV-15 | GAGGTGCAGCTGGTGCAGTCTGGAGCAGAGGTGAAAAAGCCCGGGGAGTC | 251 |
| | | TCTGAAGATCTCCTGTAAGGGTTCTGGATACAGTTTTACCAGCTACTGGA | |
| | | TCGCCTGGGTGCGCCAGATGCCCGGGAAAGGCCTGGAGTGGATGGGGATC | |
| | | ATCTATCCTGGTGACTCTGATACCAGATACAGCCCGTCCTTCCAAGGCCA | |
| | | GGTCACCATCTCAGCCGACAAGTCCATCAGCACCGCCTACCTACAGTGGA | |
| | | GCAGCCTGAAGGCCTCGGACACCGCCATGTATTTCTGTGCGAGACAAAGG | |
| | | ACGTTTTATTATGATAGTAGTGATTATTTTGACTACTGGGGCCAGGGAAC | |
| | | CCTGGTCACCGTCTCCTCA | |
| 5E3 | HV-16 | CAGGTGCAGCTGGTGCAGTCTGGGGCTGAGGTGAAGAAGCCTGGGGCCTC | 252 |
| | | AGTGAAGGTCTCCTGCAAGGCTTCTGGATACACCTTCACCGGCTACTATA | |
| | | TACACTGGGTGCGACAGGCCCCTGGACTAGGGCTTGAGTGGATGGGATGG | |
| | | ATCAACCCTTACAGTGGTGGCACAACCTCTGCACAGAAGTTTCAGGGCAG | |
| | | GGTCACCATGACCAGGGACACGTCCATCAGCTCAGCCTACATGGAACTGA | |
| | | GCAGGCTGAGATCTGACGACACGGCCGTGTATTACTGTGCGAGAGATGGA | |
| | | GGCTACCTGGCCCTCTACGGTACGGACGTCTGGGGCCAAGGGACCACGGT | |
| | | CACCGTCTCCTCA | |
| 4G10 | HV-17 | GAGGTGCAGCTGGTGCAGTCTGGAGCAGAGGTGAAAAAGCCCGGGGAGTC | 253 |
| | | TCTGAAGATCTCCTGTAAGGGTTCTGGATACAGCTTTCCCAGCTACTGGA | |
| | | TCGCCTGGGTGCGCCAGATGCCCGGGAAAGGCCTGGAGTGGATGGGGATC | |
| | | ATCTATCCTGGTGACTCTGATACCAGATACAGCCCGTCCTTCCAAGGCCA | |
| | | GGTCACCATCTCAGCCGACAAGTCCATCAGCACCGCCTTTTTGAAGTGGA | |
| | | GTAGCCTGAAGGCCTCGGACACCGCCATGTATTTCTGTGCGCGACAGGGT | |
| | | ATAGAAGTGACTGGTACGGGAGGTTTGGACGTCTGGGGCCAAGGGACCAC | |
| | | GGTCACCGTCTCCTCA | |
| V3 | HV-101 | GAGGTGCAGCTGGTGCAGTCTGGAGCAGAGGTGAAAAAGCCCGGGGAGTC | 254 |
| | | TCTGAAGATCTCCTGTAAGGGTTCTGGATACAGTTTTGCGAGCTACTGGA | |
| | | TCGCCTGGGTGCGCCAGATGCCCGGGAAAGGCCTGGAGTGGATGGGGATC | |
| | | ATCTATCCTGGTGACTCTGATACCAGATACAGCCCGTCCTTCCAAGATCA | |
| | | GGTCACCATCTCAGCCGACAAGTCCATCAGCACCGCCTACCTACAGTGGA | |
| | | GCAGCCTGAAGGCCTCGGACACCGCCATGTATTTCTGTGCGAGAGGGAGG | |
| | | ACGTTTTATTATGATAGTAGTGATTATTTTGACTACTGGGGCCAGGGAAC | |
| | | CCTGGTCACCGTGTCCTCA | |
| V24 | HV-102 | GAGGTGCAGCTGGTGCAGTCTGGAGCAGAGGTGAAAAAGCCCGGGGAGTC | 255 |
| | | TCTGAAGATCTCCTGTAAGGGTTCTGGATACAGTTTTACCAGCTACTGGA | |
| | | TTGCCTGGGTGCGCCAGATGCCCGGGAAAGGCCTGGAGTGGATGGGGATC | |
| | | ATCTATCCTGGTGACTCTGATGTGAGATACAGCCCGTCCTTCCAAGGCCA | |
| | | GGTCACCATCTCAGCCGACAAGTCCATCAGCACCGCCTACCTACAGTGGA | |
| | | GCAGCCTGAAGGCCTCGGACACCGCCATGTATTTCTGTGCGAGATCTAGG | |
| | | ACGTTTTATTATGATAGTAGTGATTATTTTGACTACTGGGGCCAGGGAAC | |
| | | CCTGGTCACCGTGTCCTCA | |
| V27 | HV-103 | GAGGTGCAGCTGGTGCAGTCTGGAGCAGAGGTGAAAAAGCCCGGGGAGTC | 256 |
| | | TCTGAAGATCTCCTGTAAGGGTTCTGGATACAGTTTTACCAGCTACTGGA | |
| | | TCGCCTGGGTGCGCCAGATGCCCGGGAAAGGCCTGGAGTGGATGGGGATC | |
| | | ATCTATCCTGGTGACTCTGATACCAGATACGCTCCGTCCTTCCAAGGCCA | |
| | | GGTCACCATCTCAGCCGACAAGTCCATCAGCACCGCCTACCTACAGTGGA | |
| | | GCAGCCTGAAGGCCTCGGACACCGCCATGTATTTCTGTGTGAGAAGTAGG | |
| | | ACGTTTTATTATGATAGTAGTGATTATTTTGACTACTGGGGCCAGGGAAC | |
| | | CCTGGTCACCGTGTCCTCA | |
| V40 | HV-104 | GAGGTGCAGCTGGTGCAGTCTGGAGCAGAGGTGAAAAAGCCCGGGGAGTC | 257 |
| | | TCTGAAGATCTCCTGTAAGGGTTCTGGATACAGTTTTGGGAGCTACTGGA | |
| | | TCGCCTGGGTGCGCCAGATGCCCGGGAAAGGCCTGGAGTGGATGGGGATC | |
| | | ATCTATCCTGGTGACTCTGATGTTAGATACAGCCCGTCCTTCCAAGGCCA | |
| | | GGTCACCATCTCAGCCGACAAGTCCATCAGCACCGCCTACCTACAGTGGA | |
| | | GCAGCCTGAAGGCCTCGGACACCGCCATGTATTTCTGTGCGAGACAAAGG | |
| | | ACGTTTTATTATGATAGTAGTGATTATTCGGACTACTGGGGCCAGGGAAC | |
| | | CCTGGTCACCGTGTCCTCA | |
| V48 | HV-105 | GAGGTGCAGCTGGTGCAGTCTGGAGCAGAGGTGAAAAAGCCCGGGGAGTC | 258 |
| | | TCTGAAGATCTCCTGTAAGGGTTCTGGATACAGTTTTGGTAGCTACTGGA | |
| | | TCGCCTGGGTGCGCCAGATGCCCGGGAAAGGCCTGGAGTGGATGGGGATC | |
| | | ATCTATCCTGGTGACTCTGATGTGAGATACAGCCCGTCCTTCCAAGGCCA | |
| | | GGTCACCATCTCAGCCGACAAGTCCATCAGCACCGCCTACCTACAGTGGA | |
| | | GCAGCCTGAAGGCCTCGGACACCGCCATGTATTTCTGTGCGAGAATGAGG | |
| | | ACGTTTTATTATGATAGTAGTGATTATTTTGACTACTGGGGCCAGGGAAC | |
| | | CCTGGTCACCGTGTCCTCA | |
| V49 | HV-106 | GAGGTGCAGCTGGTGCAGTCTGGAGCAGAGGTGAAAAAGCCCGGGGAGTC | 259 |
| | | TCTGAAGATCTCCTGTAAGGGTTCTGGATACAGTTTTAATAGCTACTGGA | |
| | | TCGCCTGGGTGCGCCAGATGCCCGGGAAAGGCCTGGAGTGGATGGGGACG | |
| | | ATCTATCCTGGTGACTCTGATACCAGACTGAGCCCGTCCTTCCAAGGCCA | |
| | | GGTCACCATCTCAGCCGACAAGTCCATCAGCACCGCCTACCTACAGTGGA | |
| | | GCAGCCTGAAGGCCTCGGACACCGCCATGTATTTCTGTGCGAGAAGTAGG | |
| | | ACGTTTTATTATGATAGTAGTGATTATTTTGACTACTGGGGCCAGGGAAC | |
| | | CCTGGTCACCGTGTCCTCA | |
| V52 | HV-107 | GAGGTGCAGCTGGTGCAGTCTGGAGCAGAGGTGAAAAAGCCCGGGGAGTC | 260 |
| | | TCTGAAGATCTCCTGTAAGGGTTCTGGATACAGTTTTGAGAGCTACTGGA | |
| | | TCGCCTGGGTGCGCCAGATGCCCGGGAAAGGCCTGGAGTGGATGGGGATC | |
| | | ATCTATCCTGGTGACTCTGATACCAGATACAGCCCGTCCTTCCAAGGCCA | |
| | | GGTCACCATCTCAGCCGACAAGTCCATCAGCACCGCCTACCTACAGTGGA | |
| | | GCAGCCTGAAGGCCTCGGACACCGCCATGTATTTCTGTGCGAGAGGGAGG | |
| | | ACGTTTTATTATGATAGTAGTGATTATTTTGACTACTGGGGCCAGGGAAC | |
| | | CCTGGTCACCGTGTCCTCA | |
| V60 | HV-108 | GAGGTGCAGCTGGTGCAGTCTGGAGCAGAGGTGAAAAAGCCCGGGGAGTC | 261 |
| | | TCTGAAGATCTCCTGTAAGGGTTCTGGATACCATTTTACCAGCTACTGGA | |
| | | TCGCCTGGGTGCGCCAGATGCCCGGGAAAGGCCTGGAGTGGATGGGGATC | |
| | | ATCTATCCTGGTGACTCTGATGTGAGATACAGCCCGTCCTTCCAAGGCCA | |
| | | GGTCACCATCTCAGCCGACAAGTCCATCAGCACCGCCTACCTACAGTGGA | |
| | | GCAGCCTGAAGGCCTCGGACACCGCCATGTATTTCTGTGCGAGACAAAGG | |
| | | ACGTTTTATTATGATAGTAGTGATTATAGTGACTACTGGGGCCAGGGAAC | |
| | | CCTGGTCACCGTGTCCTCA | |
| V73 | HV-109 | GAGGTGCAGCTGGTGCAGTCTGGAGCAGAGGTGAAAAAGCCCGGGGAGTC | 262 |
| | | TCTGAAGATCTCCTGTAAGGGTTCTGGATACAGTTTTGGTAGCTACTGGA | |
| | | TCGCCTGGGTGCGCCAGATGCCCGGGAAAGGCCTGGAGTGGATGGGGATC | |
| | | ATCTATCCTGGTGACTCTGATACCAGATACAGCCCGGGGTTCCAAGGCCA | |
| | | GGTCACCATCTCAGCCGACAAGTCCATCAGCACCGCCTACCTACAGTGGA | |
| | | GCAGCCTGAAGGCCTCGGACACCGCCATGTATTTCTGTGCGAGAGGGAGG | |
| | | ACGTTTTATTATGATAGTAGTGATTATTTTGACTACTGGGGCCAGGGAAC | |
| | | CCTGGTCACCGTGTCCTCA | |
| V76 | HV-110 | GAGGTGCAGCTGGTGCAGTCTGGAGCAGAGGTGAAAAAGCCCGGGGAGTC | 263 |
| | | TCTGAAGATCTCCTGTAAGGGTTCTGGATACAGTTTTGGGAGCTACTGGA | |
| | | TCGCCTGGGTGCGCCAGATGCCCGGGAAAGGCCTGGAGTGGATGGGGATC | |
| | | ATCTATCCTGGTGACTCTGATACCAGATACAGCCCGGAGTTCCAAGGCCA | |
| | | GGTCACCATCTCAGCCGACAAGTCCATCAGCACCGCCTACCTACAGTGGA | |
| | | GCAGCCTGAAGGCCTCGGACACCGCCATGTATTTCTGTGCGAGACAAAGG | |
| | | ACGTTTTATTATGATAGTAGTGATTATAGTGACTACTGGGGCCAGGGAAC | |
| | | CCTGGTCACCGTGTCCTCA | |
| V84 | HV-111 | GAGGTGCAGCTGGTGCAGTCTGGAGCAGAGGTGAAAAAGCCCGGGGAGTC | 264 |
| | | TCTGAAGATCTCCTGTAAGGGTTCTGGATACGGGTTTACCAGCTACTGGA | |
| | | TCGCCTGGGTGCGCCAGATGCCCGGGAAAGGCCTGGAGTGGATGGGGATC | |
| | | ATCTATCCTGGTGACAGTGATACCAGATACAGCCCGTCCTTCCAAGGCCA | |
| | | GGTCACCATCTCAGCCGACAAGTCCATCAGCACCGCCTACCTACAGTGGA | |
| | | GCAGCCTGAAGGCCTCGGACACCGCCATGTATTTCTGTGCGAGACAAAGG | |
| | | ACGTTTTATTATGATAGTAGTGATTATTCGGACTACTGGGGCCAGGGAAC | |
| | | CCTGGTCACCGTGTCCTCA | |
| V9 | HV-201 | GAGGTGCAGCTGGTGCAGTCTGGAGCAGAGGTGAAAAAGCCCGGGGAGTC | 319 |
| | | TCTGAAGATCTCCTGTAAGGGTTCTGGATACAGTTTTACCAGCTACTGGA | |
| | | TCGCCTGGGTGCGCCAGATGCCCGGGAAAGGCCTGGAGTGGATGGGGATC | |
| | | ATCTATCCTGGTGACTCTGATACCAGATACAGCCCGTCCTTCCAAGGCCA | |
| | | GGTCACCATCTCAGCCGACAAGTCCATCAGCACCGCCTACCTACAGTGGA | |
| | | GCAGCCTGAAGGCCTCGGACACCGCCATGTATTTCTGTGCGAGACAAAGG | |
| | | GGGTTTTATTATGATAGTAGTGATTATTTTGACTACTGGGGCCAGGGAAC | |
| | | CCTGGTCACCGTGTCCTCA | |
| V10 | HV-15 | GAGGTGCAGCTGGTGCAGTCTGGAGCAGAGGTGAAAAAGCCCGGGGAGTC | 320 |
| V23 | | TCTGAAGATCTCCTGTAAGGGTTCTGGATACAGTTTTACCAGCTACTGGA | |
| V57 | | TCGCCTGGGTGCGCCAGATGCCCGGGAAAGGCCTGGAGTGGATGGGGATC | |
| V70 | | ATCTATCCTGGTGACTCTGATACCAGATACAGCCCGTCCTTCCAAGGCCA | |
| V83 | | GGTCACCATCTCAGCCGACAAGTCCATCAGCACCGCCTACCTACAGTGGA | |
| | | GCAGCCTGAAGGCCTCGGACACCGCCATGTATTTCTGTGCGAGACAAAGG | |
| | | ACGTTTTATTATGATAGTAGTGATTATTTTGACTACTGGGGCCAGGGAAC | |
| | | CCTGGTCACCGTGTCCTCA | |
| V30 | HV-202 | GAGGTGCAGCTGGTGCAGTCTGGAGCAGAGGTGAAAAAGCCCGGGGAGTC | 321 |
| | | TCTGAAGATCTCCTGTAAGGGTTCTGGATCGAGTTTTACCAGCTACTGGA | |
| | | TCGCCTGGGTGCGCCAGATGCCCGGGAAAGGCCTGGAGTGGATGGGGATC | |
| | | ATCTATCCTGGTGACTCTGATACCAGATACAGCCCGTCCTTCCAAGGCCA | |
| | | GGTCACCATCTCAGCCGACAAGTCCATCAGCACCGCCTACCTACAGTGGA | |
| | | GCAGCCTGAAGGCCTCGGACACCGCCATGTATTTCTGTGCGAGACAAAGG | |
| | | ACGTTTTATTATGATAGTAGTGATTATTTTGACTACTGGGGCCAGGGAAC | |
| | | CCTGGTCACCGTGTCCTCA | |
| V33 | HV-203 | GAGGTGCAGCTGGTGCAGTCTGGAGCAGAGGTGAAAAAGCCCGGGGAGTC | 322 |
| | | TCTGAAGATCTCCTGTAAGGGTTCTGGATACAGTTTTACCAGCTACTGGA | |
| | | TCGCCTGGGTGCGCCAGATGCCCGGGAAAGGCCTGGAGTGGATGGGGATC | |
| | | ATCTATCCTGGTGACTCTGATACCAGATACAGCCCGTCCTTCCAAGGCCA | |
| | | GGTCACCATCTCAGCCGACAAGTCCATCAGCACCGCCTACCTACAGTGGA | |
| | | GCAGCCTGAAGGCCTCGGACACCGCCATGTATTTCTGTGCGAGACAAAGG | |
| | | ACGTTTTATGGGGATAGTAGTGATTATTTTGACTACTGGGGCCAGGGAAC | |
| | | CCTGGTCACCGTGTCCTCA | |
| V44 | HV-204 | GAGGTGCAGCTGGTGCAGTCTGGAGCAGAGGTGAAAAAGCCCGGGGAGTC | 323 |
| | | TCTGAAGATCTCCTGTAAGGGTTCTGGATACAGTTTTACCAGCTACTGGA | |
| | | TCGCCTGGGTGCGCCAGATGCCCGGGAAAGGCCTGGAGTGGATGGGGATC | |
| | | ATCTATCCTAGTGACTCTGATACCAGATACAGCCCGTCCTTCCAAGGCCA | |
| | | GGTCACCATCTCAGCCGACAAGTCCATCAGCACCGCCTACCTACAGTGGA | |
| | | GCAGCCTGAAGGCCTCGGACACCGCCATGTATTTCTGTGCGAGACAAAGG | |
| | | ACGTTTTATTATGATAGTAGTGATTATTTTGACTACTGGGGCCAGGGAAC | |
| | | CCTGGTCACCGTGTCCTCA | |
| V68 | HV-205 | GAGGTGCAGCTGGTGCAGTCTGGAGCAGAGGTGAAAAAGCCCGGGGAGTC | 324 |
| | | TCTGAAGATCTCCTGTAAGGGTTCTGGATACAGTTTTACCAGCTACTGGA | |
| | | TCGCCTGGGTGCGCCAGATGCCCGGGAAAGGCCTGGAGTGGATGGGGATC | |
| | | ATCTATCCTGGTGACTCTGATACCAGATACAGCCCGTCCTTCCAAGGCCA | |
| | | GGTCACCATCTCAGCCGACAAGTCCATCAGCACCGCCTACCTACAGTGGA | |
| | | GCAGCCTGAAGGCCTCGGACACCGCCATGTATTTCTGTGCGAGACAAAGG | |
| | | ACGTTTAGGTATGATAGTAGTGATTATTTTGACTACTGGGGCCAGGGAAC | |
| | | CCTGGTCACCGTGTCCTCA | |
| V90 | HV-206 | GAGGTGCAGCTGGTGCAGTCTGGAGCAGAGGTGAAAAAGCCCGGGGAGTC | 325 |
| | | TCTGAAGATCTCCTGTAAGGGTTCTGGATACAGTTTTACCAGCGAGTGGA | |
| | | TCGCCTGGGTGCGCCAGATGCCCGGGAAAGGCCTGGAGTGGATGGGGATC | |
| | | ATCTATCCTGGTGACTCTGATACCAGATACAGCCCGTCCTTCCAAGGCCA | |
| | | GGTCACCATCTCAGCCGACAAGTCCATCAGCACCGCCTACCTACAGTGGA | |
| | | GCAGCCTGAAGGCCTCGGACACCGCCATGTATTTCTGTGCGAGACAAAGG | |
| | | ACGTTTTATTATGATAGTAGTGATTATTTTGACTACTGGGGCCAGGGAAC | |
| | | CCTGGTCACCGTGTCCTCA | |

[0315] In some embodiments, an isolated nucleic acid encoding an anti-TREM2 antibody light chain variable region comprises a sequence that is at least 80% identical, at least 90% identical, at least 95% identical, or at least 98% identical to a sequence selected from SEQ ID NOs: 208-236 and 313-318. In certain embodiments, an isolated nucleic acid encoding an anti-TREM2 antibody light chain variable region comprises a sequence selected from SEQ ID NOs: 208-236 and 313-318. In related embodiments, an isolated nucleic acid encoding an anti-TREM2 antibody heavy chain variable region comprises a sequence that is at least 80% identical, at least 90% identical, at least 95% identical, or at least 98% identical to a sequence selected from SEQ ID NOs: 237-264 and 319-325. In other related embodiments, an isolated nucleic acid encoding an anti-TREM2 antibody heavy chain variable region comprises a sequence selected from SEQ ID NOs: 237-264 and 319-325.

[0316] In some embodiments, the polynucleotide encodes the full length light chain and full length heavy chain. Exemplary polynucleotide sequences are provided in Table 3F.

B. U.S. Pat. No. 8,231,878

[0317] In some embodiments, the TREM2 agonist is antibody, or an antigen-binding fragment thereof, as described in U.S. Pat. No. 8,231,878, which is incorporated by reference herein, in its entirety. In some embodiments, the TREM2 antibody is monoclonal antibody 29E3, or a fragment, homologue, derivative or variant thereof.

[0318] In some embodiments, the TREM2 antigen bind protein comprises a CDRL1, CDRL2, and CDRL3 of the light chain variable region, and a CDRH1, CDRH2, and CDRH3 of the heavy chain variable region of monoclonal antibody 29E3. Monoclonal antibody 29E3 is further described in Bouchon et al., J Exp Med., 2001, 194(8):1111-1122.

[0319] In some embodiments, the TREM2 antigen bind protein comprises a light chain variable region and a heavy chain variable region of monoclonal antibody 29E3.

[0320] In some embodiments, the TREM2 antigen bind protein is a chimeric antibody containing the light chain variable region and the heavy chain variable region of monoclonal antibody 29E3, and a human heavy chain constant region, such as a human Fc region, or an engineered variant thereof.

[0321] In some embodiments, the TREM2 antigen bind protein, e.g., a TREM2 antibody, competes with binding of monoclonal antibody 29E3 to TREM2.

C. U.S. Patent Application Publication No. US2019/0010230A1

[0322] In some embodiments, the TREM2 agonist is an antibody, or an antigen-binding fragment thereof, as described in U.S. Patent Application Publication No. US2019/0010230A1 (“the '230 application”), which is incorporated by reference herein, in its entirety.

[0323] In some embodiments, the TREM2 binding agent comprises an antibody that comprises a light chain variable domain comprising a CDRL1, CDRL2, and CDRL3 (also referred to as HVR-L1, HVR-L2, and HVR-L3, respectively), and a heavy chain variable domain comprising a CDRH1, CDRH2, and CDRH3 (also referred to as HVR-H1, HVR-H2, and HVR-H3, respectively) disclosed in the '230 application specification. In some embodiments, the TREM2 binding agent comprises an antibody that comprises a light chain variable domain and a heavy chain variable domain disclosed in the '230 application specification.

[0324] In some embodiments, the antibody comprises a heavy chain variable domain and a light chain variable domain, wherein the heavy chain variable domain comprises the HVR-H1, HVR-H2, and/or HVR-H3 of the monoclonal antibody Ab52; and/or wherein the light chain variable domain comprises the HVR-L1, HVR-L2, and/or HVR-L3 of the monoclonal antibody Ab52. In some embodiments, the HVR-H1 comprises the amino acid sequence of SEQ ID NO:772. In some embodiments, the HVR-H2 comprises the amino acid sequence of SEQ ID NO:773. In some embodiments, the HVR-H3 comprises the amino acid sequence of SEQ ID NO:774. In some embodiments, the HVR-L1 comprises the amino acid sequence of SEQ ID NO:775. In some embodiments, the HVR-L2 comprises the amino acid sequence of SEQ ID NO:776. In some embodiments, the HVR-L3 comprises the amino acid sequence of SEQ ID NO:777. In some embodiments, the antibody comprises a heavy chain variable domain and a light chain variable domain, wherein the heavy chain variable domain comprises: (a) an HVR-H1 comprising the amino acid sequence of SEQ ID NO:772, or an amino acid sequence with at least about 95% homology to the amino acid sequence of SEQ ID NO:772; (b) an HVR-H2 comprising the amino acid sequence of SEQ ID NO:773, or an amino acid sequence with at least about 95% homology to the amino acid sequence of SEQ ID NO:773; and; and/or (c) an HVR-H3 comprising the amino acid sequence of SEQ ID NO:774, or an amino acid sequence with at least about 95% homology to the amino acid sequence of SEQ ID NO:774; and/or wherein the light chain variable domain comprises: (a) an HVR-L1 comprising the amino acid sequence of SEQ ID NO:775, or an amino acid sequence with at least about 95% homology to the amino acid sequence of SEQ ID NO:775; (b) an HVR-L2 comprising the amino acid sequence of SEQ ID NO:776, or an amino acid sequence with at least about 95% homology to the amino acid sequence of SEQ ID NO:776; and/or (c) an HVR-L3 comprising the amino acid sequence of SEQ ID NO:777, or an amino acid sequence with at least about 95% homology to the amino acid sequence of SEQ ID NO:777. In some embodiments, the antibody comprises a heavy chain variable domain and a light chain variable domain, wherein the heavy chain variable domain comprises the HVR-H1, HVR-H2, and/or HVR-H3 of the monoclonal antibody Ab21; and/or wherein the light chain variable domain comprises the HVR-L1, HVR-L2, and/or HVR-L3 of the monoclonal antibody Ab21. In some embodiments, the HVR-H1 comprises the amino acid sequence of SEQ ID NO:778. In some embodiments, the HVR-H2 comprises the amino acid sequence of SEQ ID NO:779. In some embodiments, the HVR-H3 comprises the amino acid sequence of SEQ ID NO:780. In some embodiments, the HVR-L1 comprises the amino acid sequence of SEQ ID NO:781. In some embodiments, the HVR-L2 comprises the amino acid sequence of SEQ ID NO:782. In some embodiments, the HVR-L3 comprises the amino acid sequence of SEQ ID NO:783. In some embodiments, the antibody comprises a heavy chain variable domain and a light chain variable domain, wherein the heavy chain variable domain comprises: (a) an HVR-H1 comprising the amino acid sequence of SEQ ID NO:778, or an amino acid sequence with at least about 95% homology to the amino acid sequence of SEQ ID NO:778; (b) an HVR-H2 comprising the amino acid sequence of SEQ ID NO:779, or an amino acid sequence with at least about 95% homology to the amino acid sequence of SEQ ID NO:779; and/or (c) an HVR-H3 comprising the amino acid sequence of SEQ ID NO:780, or an amino acid sequence with at least about 95% homology to the amino acid sequence of SEQ ID NO:780, and/or wherein the light chain variable domain comprises: (a) an HVR-L1 comprising the amino acid sequence of SEQ ID NO:781, or an amino acid sequence with at least about 95% homology to the amino acid sequence of SEQ ID NO:781;
[0325] (b) an HVR-L2 comprising the amino acid sequence of SEQ ID NO:782, or an amino acid sequence with at least about 95% homology to the amino acid sequence of SEQ ID NO:782; and/or
[0326] (c) an HVR-L3 comprising the amino acid sequence of SEQ ID NO:783, or an amino acid sequence with at least about 95% homology to the amino acid sequence of SEQ ID NO:783.

[0327] In some embodiments, the heavy chain variable domain comprises the HVR-H1, HVR-H2, and/or HVR-H3 of the monoclonal antibody Ab52; and/or wherein the light chain variable domain comprises the HVR-L1, HVR-L2, and/or HVR-L3 of the monoclonal antibody Ab52. In some embodiments, the HVR-H1 comprises the amino acid sequence of SEQ ID NO:772. In some embodiments, the HVR-H2 comprises the amino acid sequence of SEQ ID NO:773. In some embodiments, the HVR-H3 comprises the amino acid sequence of SEQ ID NO:774. In some embodiments, the HVR-L1 comprises the amino acid sequence of SEQ ID NO:775. In some embodiments, the HVR-L2 comprises the amino acid sequence of SEQ ID NO:776. In some embodiments, the HVR-L3 comprises the amino acid sequence of SEQ ID NO:777. In some embodiments, the antibody comprises a heavy chain variable domain and a light chain variable domain, wherein the heavy chain variable domain comprises an HVR-H1 comprising the amino acid sequence of SEQ ID NO:772, an HVR-H2 comprising the amino acid sequence of SEQ ID NO:773, and an HVR-H3 comprising the amino acid sequence of SEQ ID NO:774, and/or wherein the light chain variable domain comprises an HVR-L1 comprising the amino acid sequence of SEQ ID NO:775, an HVR-L2 comprising the amino acid sequence of SEQ ID NO:776, and an HVR-L3 comprising the amino acid sequence of SEQ ID NO:777.

[0328] In some embodiments, the heavy chain variable domain comprises: (a) an HVR-H1 comprising the amino acid sequence of SEQ ID NO:772, or an amino acid sequence with at least about 95% homology to the amino acid sequence of SEQ ID NO:772; (b) an HVR-H2 comprising the amino acid sequence of SEQ ID NO:773, or an amino acid sequence with at least about 95% homology to the amino acid sequence of SEQ ID NO:773; and; and/or (c) an HVR-H3 comprising the amino acid sequence of SEQ ID NO:774, or an amino acid sequence with at least about 95% homology to the amino acid sequence of SEQ ID NO:774; and/or wherein the light chain variable domain comprises: (a) an HVR-L1 comprising the amino acid sequence of SEQ ID NO:775, or an amino acid sequence with at least about 95% homology to the amino acid sequence of SEQ ID NO:775; (b) an HVR-L2 comprising the amino acid sequence of SEQ ID NO:776, or an amino acid sequence with at least about 95% homology to the amino acid sequence of SEQ ID NO:776; and/or (c) an HVR-L3 comprising the amino acid sequence of SEQ ID NO:777, or an amino acid sequence with at least about 95% homology to the amino acid sequence of SEQ ID NO:777.

[0329] In some embodiments, the heavy chain variable domain comprises the HVR-H1, HVR-H2, and/or HVR-H3 of the monoclonal antibody Ab21; and/or wherein the light chain variable domain comprises the HVR-L1, HVR-L2, and/or HVR-L3 of the monoclonal antibody Ab21. In some embodiments, the HVR-H1 comprises the amino acid sequence of SEQ ID NO:778. In some embodiments, the HVR-H2 comprises the amino acid sequence of SEQ ID NO:779. In some embodiments, the HVR-H3 comprises the amino acid sequence of SEQ ID NO:780. In some embodiments, the HVR-L1 comprises the amino acid sequence of SEQ ID NO:781. In some embodiments, the HVR-L2 comprises the amino acid sequence of SEQ ID NO:782. In some embodiments, the HVR-L3 comprises the amino acid sequence of SEQ ID NO:783. In some embodiments, the antibody comprises a heavy chain variable domain and a light chain variable domain, wherein the heavy chain variable domain comprises an HVR-H1 comprising the amino acid sequence of SEQ ID NO:778, an HVR-H2 comprising the amino acid sequence of SEQ ID NO:779, and an HVR-H3 comprising the amino acid sequence of SEQ ID NO:780, and/or wherein the light chain variable domain comprises an HVR-L1 comprising the amino acid sequence of SEQ ID NO:781, an HVR-L2 comprising the amino acid sequence of SEQ ID NO:782, and an HVR-L3 comprising the amino acid sequence of SEQ ID NO:783.

[0330] In some embodiments, the heavy chain variable domain comprises: (a) an HVR-H1 comprising the amino acid sequence of SEQ ID NO:778, or an amino acid sequence with at least about 95% homology to the amino acid sequence of SEQ ID NO:778; (b) an HVR-H2 comprising the amino acid sequence of SEQ ID NO:779, or an amino acid sequence with at least about 95% homology to the amino acid sequence of SEQ ID NO:779; and/or (c) an HVR-H3 comprising the amino acid sequence of SEQ ID NO:780, or an amino acid sequence with at least about 95% homology to the amino acid sequence of SEQ ID NO:780, and/or wherein the light chain variable domain comprises: (a) an HVR-L1 comprising the amino acid sequence of SEQ ID NO:781, or an amino acid sequence with at least about 95% homology to the amino acid sequence of SEQ ID NO:781; (b) an HVR-L2 comprising the amino acid sequence of SEQ ID NO:782, or an amino acid sequence with at least about 95% homology to the amino acid sequence of SEQ ID NO:782; and/or (c) an HVR-L3 comprising the amino acid sequence of SEQ ID NO:783, or an amino acid sequence with at least about 95% homology to the amino acid sequence of SEQ ID NO:783.

[0331] In some embodiments, the antibody comprises a heavy chain variable domain and a light chain variable domain, wherein the heavy chain variable domain comprises: (a) an HVR-H1 comprising an amino acid sequence selected from the group consisting of SEQ ID NOs:3-24, 772, and 778; an HVR-H2 comprising an amino acid sequence selected from the group consisting of SEQ ID NOs:25-49, 773, and 779; and (c) an HVR-H3 c comprising an amino acid sequence selected from the group consisting of SEQ ID NOs:50-119, 774, and 780; and/or wherein the light chain variable domain comprises: (a) an HVR-L1 c comprising an amino acid sequence selected from the group consisting of SEQ ID NOs:120-137, 775, and 781; (b) an HVR-L2 comprising an amino acid sequence selected from the group consisting of SEQ ID NOs:138-152, 776, and 782; and (c) an HVR-L3 comprising an amino acid sequence selected from the group consisting of SEQ ID NOs:153-236, 777, and 783. In any of the above embodiments, the light chain variable domain and/or heavy chain variable domain comprises an amino acid sequence with at least about 90% homology to the amino acid sequence indicated.

[0332] In some embodiments, the antibody is an antibody disclosed in Tables 1A, 1B and 8 and FIGS. 20A and 20B of U.S. Patent Application Publication No. US2019/0010230A1, reproduced below as Tables 6A-6E.

TABLE 6A
Kabat heavy chain CD sequences

| Antibody | | | |
|---|---|---|---|
| Name | CDR L1 | CDR L2 | CDR L3 |
| Ab21 | YSFTTYWIG | IIYPGDSDTRYSPSFQG | ARAGHYDGGHLGMDV |
| | (SEQ ID NO: 778) | (SEQ ID NO: 779) | (SEQ ID NO: 780) |
| Ab52 | YTFTSYYIH | IINPSGGSTSYAQKFQG | AREADDSSGYPLGLDV |
| | (SEQ ID NO: 772) | (SEQ ID NO: 773) | (SEQ ID NO: 774) |

TABLE 6B
Kabat light chain CDR sequences

| Antibody | | | |
|---|---|---|---|
| Name | CDR L1 | CDR L2 | CDR L3 |
| Ab21 | RASQSVSSSYLA | GASNRAT | QQDDSAPYT |
| | (SEQ ID NO: 781) | (SEQ ID NO: 782) | (SEQ ID NO: 783) |
| Ab52 | RASQSVSSNLA | GASTRAT | QQVNSLPPT |
| | (SEQ ID NO: 775) | (SEQ ID NO: 776) | (SEQ ID NO: 777) |

TABLE 6C
Kabat CDR sequences

| Antibody | | | | | | |
|---|---|---|---|---|---|---|
| Name | CDR H1 | CDR H2 | CDR H3 | CDR L1 | CDR L2 | CDR L3 |
| Ab1 | FTFSSYAMS | VISGSGGSTYYADS | AKGTPTLLFQH | RASQSVSSNLA | GASTRAT | QQLPYWPPT |
| | (SEQ ID NO: 377) | VKG | (SEQ ID NO: 424) | (SEQ ID NO: 494) | (SEQ ID NO: 512) | (SEQ ID NO: 527) |
| | | (SEQ ID NO: 399) | | | | |
| Ab2 | FTFSSSAMS | AISGSGGSTYYADS | AKVPSYDYWSGYSN | RASQSVGSNLA | GASTRAT | QQYFFYPPT |
| | (SEQ ID NO: 378) | VKG | YYYYMDV | (SEQ ID NO: 495) | (SEQ ID NO: 512) | (SEQ ID NO: 528) |
| | | (SEQ ID NO: 400) | (SEQ ID NO: 425) | | | |
| Ab3 | GTFSSYAIS | GIIPIFGTANYAQKF | AREQYHVGMDV | QASQDISNYLN | DASNLAT | QQPFNFPYT |
| | (SEQ ID NO: 379) | QG | (SEQ ID NO: 426) | (SEQ ID NO: 496) | (SEQ ID NO: 513) | (SEQ ID NO: 529) |
| | | (SEQ ID NO: 401) | | | | |
| Ab4 | GTFSSYAIS | GIIPIFGTASYAQKFQ | ARGVDSIMDY | RASQSVSSNLA | SASTRAT | QQDHDYPFT |
| | (SEQ ID NO: 379) | G | (SEQ ID NO: 427) | (SEQ ID NO: 494) | (SEQ ID NO: 514) | (SEQ ID NO: 530) |
| | | (SEQ ID NO: 402) | | | | |
| Ab5 | YTFTSYYIH | IINPSGGSTSYAQKF | ARAPQESPYVFDI | RASQSVSSSYLA | GASSRAT | QQYFSSPFT |
| | (SEQ ID NO: 380) | QG | (SEQ ID NO: 428) | (SEQ ID NO: 497) | (SEQ ID NO: 515) | (SEQ ID NO: 531) |
| | | (SEQ ID NO: 403) | | | | |
| Ab6 | YTFTSYYMH | IINPGGGSTSYAQKF | ARGSPTYGYLYDP | RASQSVSSYLA | DASKRAT | QQRVNLPPT |
| | (SEQ ID NO: 381) | QG | (SEQ ID NO: 429) | (SEQ ID NO: 498) | (SEQ ID NO: 516) | (SEQ ID NO: 532) |
| | | (SEQ ID NO: 404) | | | | |
| Ab7 | YTFTSYYMH | IINPSGGSTTYAQKF | ARTSSKERDY | RASQSVSSYLA | DASKRAT | QQRISYPIT |
| | (SEQ ID NO: 381) | QG | (SEQ ID NO: 430) | (SEQ ID NO: 498) | (SEQ ID NO: 516) | (SEQ ID NO: 533) |
| | | (SEQ ID NO: 405) | | | | |
| Ab8 | GSISSSSYYWG | SISYSGSTYYNPSLK | ARGPYRLLLGMDV | RASQSISSYLN | GASSLQS | QQIDDTPIT |
| | (SEQ ID NO: 382) | S | (SEQ ID NO: 431) | (SEQ ID NO: 499) | (SEQ ID NO: 517) | (SEQ ID NO: 534) |
| | | (SEQ ID NO: 406) | | | | |
| Ab9 | YSFTSYWIG | IIYPGDSDTTYSPSFQ | ARLHISGEVNWFDP | RASQSVSSYLA | DASNRAT | QQFSYWPWT |
| | (SEQ ID NO: 383) | G | (SEQ ID NO: 432) | (SEQ ID NO: 498) | (SEQ ID NO: 518) | (SEQ ID NO: 535) |
| | | (SEQ ID NO: 407) | | | | |
| Ab10 | YSFTSNWIG | IIYPGDSDTRYSPSF | AREAGYDYGELAFD | RASQSVSSSYLA | GASSRAT | QQHDSSPPT |
| | (SEQ ID NO: 384) | QG | I | (SEQ ID NO: 497) | (SEQ ID NO: 515) | (SEQ ID NO: 536) |
| | | (SEQ ID NO: 408) | (SEQ ID NO: 433) | | | |
| Abl11 | YSFTTYWIG | IIYPGDSDTRYSPSF | ARAGHYDGGHLGM | RASQSVSSDYLA | GASSRAT | QQDYSYPWT |
| | (SEQ ID NO: 385) | QG | DV | (SEQ ID NO: 500) | (SEQ ID NO: 515) | (SEQ ID NO: 537) |
| | | (SEQ ID NO: 408) | (SEQ ID NO: 434) | | | |
| Ab12 | YSFTSYWIG | IIYPGDSDTRYSPSF | ARLGHYSGTVSSYG | RASQSISSYLN | AASSLQS | QQEYAVPYT |
| | (SEQ ID NO: 383) | QG | MDV | (SEQ ID NO: 499) | (SEQ ID NO: 519) | (SEQ ID NO: 538) |
| | | (SEQ ID NO: 408) | (SEQ ID NO: 435) | | | |
| Ab13 | YTFTSYGIS | WISAYNGNTNYAQ | ARGPSHYYDLA | RASQSVSSYLA | DASNRAT | QQVSNYPIT |
| | (SEQ ID NO: 386) | KLQG | (SEQ ID NO: 436) | (SEQ ID NO: 498) | (SEQ ID NO: 518) | (SEQ ID NO: 539) |
| | | (SEQ ID NO: 409) | | | | |
| Ab14 | GSISSGGYYWS | NIYYSGSTVYNPSLK | ARGLYGYGVLDV | QASQDISNYLN | DASNLET | QQVDNIPPT |
| | (SEQ ID NO: 387) | S | (SEQ ID NO: 437) | (SEQ ID NO: 496) | (SEQ ID NO: 520) | (SEQ ID NO: 540) |
| | | (SEQ ID NO: 410) | | | | |
| Ab15 | GSISSGGYYWS | NIYYSGSTVYNPSLK | ARGLYGYGVLDV | QASQDISNYLN | DASNLET | QQFDTYPT |
| | (SEQ ID NO: 387) | S | (SEQ ID NO: 437) | (SEQ ID NO: 496) | (SEQ ID NO: 520) | (SEQ ID NO: 541) |
| | | (SEQ ID NO: 410) | | | | |
| Ab16 | GSISSNSYYWG | SIYYSGSTYYNPSLK | ARGVLGYGVFDY | QASQDISNYLN | DASNLET | QQFLNFPT |
| | (SEQ ID NO: 388) | S | (SEQ ID NO: 438) | (SEQ ID NO: 496) | (SEQ ID NO: 520) | (SEQ ID NO: 542) |
| | | (SEQ ID NO: 411) | | | | |
| Ab17 | GSISSNSYYWG | SIYYSGSTYYNPSLK | ARGVLGYGVFDY | QASQDISNYLN | DASNLET | QQFFNFPT |
| | (SEQ ID NO: 388) | S | (SEQ ID NO: 438) | (SEQ ID NO: 496) | (SEQ ID NO: 520) | (SEQ ID NO: 543) |
| | | (SEQ ID NO: 411) | | | | |
| Ab18 | GSISSYYWS | SIYYSGSTNYNPSLK | ARDGGGEYPSGTPF | QASQDISNYLN | DASNLET | QQFIDLPFT |
| | (SEQ ID NO: 389) | S | DI | (SEQ ID NO: 496) | (SEQ ID NO: 520) | (SEQ ID NO: 544) |
| | | (SEQ ID NO: 412) | (SEQ ID NO: 439) | | | |
| Ab19 | GSISSYYWS | SIYYSGSTNYNPSLK | ARDGGGEYPSGTPF | QASQDISNYLN | DASNLET | QQYYDLPFT |
| | (SEQ ID NO: 389) | S | DI | (SEQ ID NO: 496) | (SEQ ID NO: 520) | (SEQ ID NO: 545) |
| | | (SEQ ID NO: 412) | (SEQ ID NO: 439) | | | |
| Ab20 | GSISSYYWS | SIYYSGSTNYNPSLK | ARSGMASFFDY | RASQSVSSDYLA | GASSRAT | QQFSSHPFT |
| | (SEQ ID NO: 389) | S | (SEQ ID NO: 440) | (SEQ ID NO: 500) | (SEQ ID NO: 515) | (SEQ ID NO: 546) |
| | | (SEQ ID NO: 412) | | | | |
| Ab22 | YSFTTYWIG | IIYPGDSDTRYSPSF | ARAGHYDGGHLGM | RASQSVSSSYLA | GASSRAT | QQDDRSPYT |
| | (SEQ ID NO: 385) | QG | DV | (SEQ ID NO: 497) | (SEQ ID NO: 515) | (SEQ ID NO: 547) |
| | | (SEQ ID NO: 408) | (SEQ ID NO: 434) | | | |
| Ab23 | FTFSSYAMS | AISGSGGSTYYADS | AKLGGHSMDV | KSSQSVLYSSNN | WASTRES | QQAYLPPIT |
| | (SEQ ID NO: 377) | VKG | (SEQ ID NO: 441) | KNYLA | (SEQ ID NO: 521) | (SEQ ID NO: 548) |
| | | (SEQ ID NO: 400) | | (SEQ ID NO: 501) | | |
| Ab24 | FTFSSYAMS | AISGSGGSTYYADS | AKPLKRGRGFY | RASQSISSYLN | AASSLQS | QQAFSPPPWT |
| | (SEQ ID NO: 377) | VKG | (SEQ ID NO: 442) | (SEQ ID NO: 499) | (SEQ ID NO: 519) | (SEQ ID NO: 549) |
| | | (SEQ ID NO: 400) | | | | |
| Ab25 | FTFSSYAMS | VISGSGGSTYYADS | AKEGRTITMD | RASQSVSSSYLA | GASSRAT | QQDDRSPT |
| | (SEQ ID NO: 377) | VKG | (SEQ ID NO: 443) | (SEQ ID NO: 497) | (SEQ ID NO: 515) | (SEQ ID NO: 550) |
| | | (SEQ ID NO: 399) | | | | |
| Ab26 | FTFSSYAMS | VISGSGGSTYYADS | AKDQYSVLDY | RASQSVSSYLA | DASNRAT | QQEFDLPFT |
| | (SEQ ID NO: 377) | VKG | (SEQ ID NO: 444) | (SEQ ID NO: 498) | (SEQ ID NO: 518) | (SEQ ID NO: 551) |
| | | (SEQ ID NO: 399) | | | | |
| Ab27 | FTFSSYAMS | AISGSGGSTYYADS | AKKYSSRGVYFDY | RASQSVSSYLA | DASNRAT | QQYNNFPPT |
| | (SEQ ID NO: 377) | VKG | (SEQ ID NO: 445) | (SEQ ID NO: 498) | (SEQ ID NO: 518) | (SEQ ID NO: 552) |
| | | (SEQ ID NO: 400) | | | | |
| Ab28 | FTFSSYAMS | AISGSGGSTYYADS | ARLGGAVGARHVT | RASQSVSSYLA | DASKRAT | QQRYLRPIT |
| | (SEQ ID NO: 377) | VKG | YFDY | (SEQ ID NO: 498) | (SEQ ID NO: 516) | (SEQ ID NO: 553) |
| | | (SEQ ID NO: 400) | (SEQ ID NO: 446) | | | |
| Ab29 | FTFSSYGMH | VISYDGSNKYYADS | ARGQYYGGSGWFD | RASQSVSSSYLA | GASSRAT | QQPGAVPT |
| | (SEQ ID NO: 390) | VKG | P | (SEQ ID NO: 497) | (SEQ ID NO: 515) | (SEQ ID NO: 554) |
| | | (SEQ ID NO: 413) | (SEQ ID NO: 447) | | | |
| Ab30 | FTFSSYAMS | AISGSGGSTYYADS | ARLGQEYAYFQH | RASQSISSYLN | GASSLQS | QQVYITPIT |
| | (SEQ ID NO: 377) | VKG | (SEQ ID NO: 448) | (SEQ ID NO: 499) | (SEQ ID NO: 517) | (SEQ ID NO: 555) |
| | | (SEQ ID NO: 400) | | | | |
| Ab31 | FTFSSYGMH | LIWYDGSNKYYAD | ARRRDGYYDEVFDI | QASQDISNFLN | DASNLET | QQPVDLPFT |
| | (SEQ ID NO: 390) | S VKG | (SEQ ID NO: 449) | (SEQ ID NO: 502) | (SEQ ID NO: 520) | (SEQ ID NO: 556) |
| | | (SEQ ID NO: 414) | | | | |
| Ab32 | FTFSSYAMS | AISGSGGSTYYADS | ARVPKHYVVLDY | RASQSVSSYLA | DASNRAT | QQYSFFPPT |
| | (SEQ ID NO: 377) | VKG | (SEQ ID NO: 450) | (SEQ ID NO: 498) | (SEQ ID NO: 518) | (SEQ ID NO: 557) |
| | | (SEQ ID NO: 400) | | | | |
| Ab33 | FTFSSYGMH | VISYDGSNKYYADS | ARAGGHLFDY | RASQSVSSYLA | DASNRAT | QQDSSFPPT |
| | (SEQ ID NO: 390) | VKG | (SEQ ID NO: 451) | (SEQ ID NO: 498) | (SEQ ID NO: 518) | (SEQ ID NO: 558) |
| | | (SEQ ID NO: 413) | | | | |
| Ab34 | FTFSSYGMH | VISYDGSNKYYADS | ARDRGGEYVDFAFD | RASQSISSYLN | AASSLQS | QQSDFPPWT |
| | (SEQ ID NO: 390) | VKG | I | (SEQ ID NO: 499) | (SEQ ID NO: 519) | (SEQ ID NO: 559) |
| | | (SEQ ID NO: 413) | (SEQ ID NO: 452) | | | |
| Ab35 | FTFSSYAMS | AISGSGGSTYYADS | ARTRSGYGASNYFD | RASQSISSYLN | AASSLQS | QQGYSAPIT |
| | (SEQ ID NO: 377) | VKG | Y | (SEQ ID NO: 499) | (SEQ ID NO: 519) | (SEQ ID NO: 560) |
| | | (SEQ ID NO: 400) | (SEQ ID NO: 453) | | | |
| Ab36 | FTFSTYGMH | VIWYDGSNKYYA | ARGTGAAAASPAFDI | RASQSVSSYLA | DASNRAT | QQLFDWPT |
| | (SEQ ID NO: 391) | DS VKG | (SEQ ID NO: 454) | (SEQ ID NO: 498) | (SEQ ID NO: 518) | (SEQ ID NO: 561) |
| | | (SEQ ID NO: 415) | | | | |
| Ab37 | FTFSSYAMS | AISGSGGSTYYADS | ARVGQYMLGMDV | RASQSVSSYLA | DASNRAT | QQRAFLFT |
| | (SEQ ID NO: 377) | VKG | (SEQ ID NO: 455) | (SEQ ID NO: 498) | (SEQ ID NO: 518) | (SEQ ID NO: 562) |
| | | (SEQ ID NO: 400) | | | | |
| Ab38 | FTFSTYGMH | VIWYDGSNKYYAD | ARGAPVDYGGIEPE | RASQSVSSYLA | DASNRAT | QQIDFLPYT |
| | (SEQ ID NO: 391) | S VKG | YFQH | (SEQ ID NO: 498) | (SEQ ID NO: 518) | (SEQ ID NO: 563) |
| | | (SEQ ID NO: 415) | (SEQ ID NO: 456) | | | |
| Ab39 | FTFSSYAMS | AISGSGGSTYYADS | AKHYHVGIAFDI | RASQSISSYLN | AASSLQS | QQVYSPPIT |
| | (SEQ ID NO: 377) | VKG | (SEQ ID NO: 457) | (SEQ ID NO: 499) | (SEQ ID NO: 519) | (SEQ ID NO: 564) |
| | | (SEQ ID NO: 400) | | | | |
| Ab40 | FTFSSYAMS | AISGSGGSTYYADS | ARTRSGYGASNYFD | RASQSISSYLN | AASSLQS | QQGYAAPIT |
| | (SEQ ID NO: 377) | VKG | Y | (SEQ ID NO: 499) | (SEQ ID NO: 519) | (SEQ ID NO: 565) |
| | | (SEQ ID NO: 400) | (SEQ ID NO: 453) | | | |
| Ab41 | FTFSTYAMS | AISGSGGSTYYADS | ARAMARKSVAFDI | RASQSVSSYLA | DASNRAT | QQRYALPIT |
| | (SEQ ID NO: 392) | VKG | (SEQ ID NO: 458) | (SEQ ID NO: 498) | (SEQ ID NO: 518) | (SEQ ID NO: 566) |
| | | (SEQ ID NO: 400) | | | | |
| Ab42 | FTFSSSAMS | AISGSGGSTYYADS | AKVPSYQRGTAFDP | RASQSVSSSYLA | GASSRAT | QQYASPPIT |
| | (SEQ ID NO: 378) | VKG | (SEQ ID NO: 459) | (SEQ ID NO: 497) | (SEQ ID NO: 515) | (SEQ ID NO: 567) |
| | | (SEQ ID NO: 400) | | | | |
| Ab43 | FTFSSSAMS | AISGSGGSTYYADS | AKSPAVAGIYRADY | RASQSISRYLN | AASSLQS | QQVYSTPIT |
| | (SEQ ID NO: 378) | VKG | (SEQ ID NO: 460) | (SEQ ID NO: 503) | (SEQ ID NO: 519) | (SEQ ID NO: 568) |
| | | (SEQ ID NO: 400) | | | | |
| Ab44 | FTFSTYGMH | VIWYDGSNKYYAD | ARGTGAAAASPAFDI | RASQSVSSYLA | DSSNRAT | QQLVHWPT |
| | (SEQ ID NO: 391) | S VKG | (SEQ ID NO: 454) | (SEQ ID NO: 498) | (SEQ ID NO: 522) | (SEQ ID NO: 569) |
| | | (SEQ ID NO: 415) | | | | |
| Ab45 | YTFTSYYMH | IINPSGGSTSYAQKF | ARGPGYTTALDYY | RASQSVSSNLA | GASTRAT | QQLDDWFT |
| | (SEQ ID NO: 381) | QG | Y MDV | (SEQ ID NO: 494) | (SEQ ID NO: 512) | (SEQ ID NO: 570) |
| | | (SEQ ID NO: 403) | (SEQ ID NO: 461) | | | |
| Ab46 | YTFTSYYMH | IINPSGGSTSYAQKF | ARPAKTADY | RASQSVSSYLA | DSSNRAT | QQRSNYPIT |
| | (SEQ ID NO: 381) | QG | (SEQ ID NO: 462) | (SEQ ID NO: 498) | (SEQ ID NO: 522) | (SEQ ID NO: 571) |
| | | (SEQ ID NO: 403) | | | | |
| Ab47 | YTFTSYYMH | IINPSGGSTTYAQKF | ARPGKSMDV | RASQSVSSYLA | DASNRAT | QQRILYPIT |
| | (SEQ ID NO: 381) | QG | (SEQ ID NO: 463) | (SEQ ID NO: 498) | (SEQ ID NO: 518) | (SEQ ID NO: 572) |
| | | (SEQ ID NO: 405) | | | | |
| Ab48 | YTFTSYYMH | IINPSGGSTTYAQKF | ARPGKSMDV | RASQSVSSYLA | DASNRAT | QQRAAYPIT |
| | (SEQ ID NO: 381) | QG | (SEQ ID NO: 463) | (SEQ ID NO: 498) | (SEQ ID NO: 518) | (SEQ ID NO: 573) |
| | | (SEQ ID NO: 405) | | | | |
| Ab49 | YTFTSYYMH | IINPSGGSTSYAQKF | ARPAKTADY | RASQSVSSYLA | DASKRAT | QQRTSHPIT |
| | (SEQ ID NO: 381) | QG | (SEQ ID NO: 462) | (SEQ ID NO: 498) | (SEQ ID NO: 516) | (SEQ ID NO: 574) |
| | | (SEQ ID NO: 403) | | | | |
| Ab50 | YTFTSYYIH | IINPSGGSTSYAQKF | ARAPQESPYVFDI | RASQSVSSSYLA | GASSRAT | QQYAGSPFT |
| | (SEQ ID NO: 380) | QG | (SEQ ID NO: 428) | (SEQ ID NO: 497) | (SEQ ID NO: 515) | (SEQ ID NO: 575) |
| | | (SEQ ID NO: 403) | | | | |
| Ab51 | YTFTSYYMH | IINPSGGSTSYAQKF | ARGVGGQDYYYMD | RASQSISSYLN | AASSLQS | QQFDDVFT |
| | (SEQ ID NO: 381) | QG | V | (SEQ ID NO: 499) | (SEQ ID NO: 519) | (SEQ ID NO: 576) |
| | | (SEQ ID NO: 403) | (SEQ ID NO: 464) | | | |
| Ab53 | YTFTSYYIH | IINPSGGSTSYAQKF | ARAPQESPYVFDI | RASQSVSSSYLA | GASSRAT | QQYVNSPFT |
| | (SEQ ID NO: 380) | QG | (SEQ ID NO: 428) | (SEQ ID NO: 497) | (SEQ ID NO: 515) | (SEQ ID NO: 577) |
| | | (SEQ ID NO: 403) | | | | |
| Ab54 | YTFTSYYMH | IINPSGGSTSYAQKF | ARGPGYTTALDYY | RASQSINSYLN | AASSLQS | QQSDDDPFT |
| | (SEQ ID NO: 381) | QG | Y MDV | (SEQ ID NO: 504) | (SEQ ID NO: 519) | (SEQ ID NO: 578) |
| | | (SEQ ID NO: 403) | (SEQ ID NO: 461) | | | |
| Ab55 | YTFTGSYMH | WINPNSGGTNYAQ | ARGPLYHPMIFDY | RASQSVSSYLA | DASNRAT | QQLSTYPLT |
| | (SEQ ID NO: 393) | K FQG | (SEQ ID NO: 465) | (SEQ ID NO: 498) | (SEQ ID NO: 518) | (SEQ ID NO: 579) |
| | | (SEQ ID NO: 416) | | | | |
| Ab56 | YTFTGYYMH | SINPNSGGTNYAQK | ARASSVDN | RASQSVSSYLA | DASNRAT | QQRSVYPIT |
| | (SEQ ID NO: 394) | FQG | (SEQ ID NO: 466) | (SEQ ID NO: 498) | (SEQ ID NO: 518) | (SEQ ID NO: 580) |
| | | (SEQ ID NO: 417) | | | | |
| Ab57 | YTFTNYGIS | WISAYNGNTNYAQ | ARGPTKAYYGSGS | RASQSVSSYLA | DASKRAT | QQVSLFPLT |
| | (SEQ ID NO: 395) | KLQG | Y VVFDP | (SEQ ID NO: 498) | (SEQ ID NO: 516) | (SEQ ID NO: 581) |
| | | (SEQ ID NO: 409) | (SEQ ID NO: 467) | | | |
| Ab58 | YSFTSYWIG | IIYPGDSDTRYSPSF | ARLGIYSTGATAFDI | RASQSISSWLA | DASSLES | LDYNSYSPIT |
| | (SEQ ID NO: 383) | QG | (SEQ ID NO: 468) | (SEQ ID NO: 505) | (SEQ ID NO: 523) | (SEQ ID NO: 582) |
| | | (SEQ ID NO: 408) | | | | |
| Ab59 | YTFTGSYMH | WINPNSGGTNYAQ | ARGGVWYSLFDI | QASQDISNYLN | DASNLET | QQHIALPFT |
| | (SEQ ID NO: 393) | K FQG | (SEQ ID NO: 469) | (SEQ ID NO: 496) | (SEQ ID NO: 520) | (SEQ ID NO: 583) |
| | | (SEQ ID NO: 416) | | | | |
| Ab60 | YTFTGYYMH | WINPNSGGTSYAQ | ARASKMGDD | RASQSVSSYLA | DASKRAT | QQRASMPIT |
| | (SEQ ID NO: 394) | K FQG | (SEQ ID NO: 470) | (SEQ ID NO: 498) | (SEQ ID NO: 516) | (SEQ ID NO: 584) |
| | | (SEQ ID NO: 418) | | | | |
| Ab61 | YTFTSYGIH | WISAYNGNTNYAQ | ARGGVPRVSYFQH | RASQSVSSYLA | DSSNRAT | QQAFNRPPT |
| | (SEQ ID NO: 396) | KLQG | (SEQ ID NO: 471) | (SEQ ID NO: 498) | (SEQ ID NO: 522) | (SEQ ID NO: 585) |
| | | (SEQ ID NO: 409) | | | | |
| Ab62 | YSFTSYWIG | IIYPGDSDTRYSPSF | ARAGHYDDWSGLG | RASQSVSSYLA | DASKRAT | QQSSVHPYT |
| | (SEQ ID NO: 383) | QG | LDV | (SEQ ID NO: 498) | (SEQ ID NO: 516) | (SEQ ID NO: 586) |
| | | (SEQ ID NO: 408) | (SEQ ID NO: 472) | | | |
| Ab63 | YTFTSYGIS | WISTYNGNTNYAQ | ARGSGSGYDSWYD | RASQGIDSWLA | AASSLQS | QQAYSLPPT |
| | (SEQ ID NO: 386) | K LQG | (SEQ ID NO: 473) | (SEQ ID NO: 506) | (SEQ ID NO: 519) | (SEQ ID NO: 587) |
| | | (SEQ ID NO: 419) | | | | |
| Ab64 | YSFTSYWIG | IIYPGDSDTRYSPSF | ARLGRWSSGSTAFDI | RASQSVSSNLA | GASTRAT | QQDDDGYT |
| | (SEQ ID NO: 383) | QG | (SEQ ID NO: 474) | (SEQ ID NO: 494) | (SEQ ID NO: 512) | (SEQ ID NO: 588) |
| | | (SEQ ID NO: 408) | | | | |
| Ab65 | YSFTSYWIG | IIYPGDSDTRYSPSF | ARLGRKPSGSVAFDI | RASQSVSSYLA | DASNRAT | QQDYSWPYT |
| | (SEQ ID NO: 383) | QG | (SEQ ID NO: 475) | (SEQ ID NO: 498) | (SEQ ID NO: 518) | (SEQ ID NO: 589) |
| | | (SEQ ID NO: 408) | | | | |
| Ab66 | YTFTGSYMH | WINPNSGGTNYAQ | ARAGHKTHDY | RASQSVSSYLA | DASNRAT | QQRSAYPIT |
| | (SEQ ID NO: 393) | K FQG | (SEQ ID NO: 476) | (SEQ ID NO: 498) | (SEQ ID NO: 518) | (SEQ ID NO: 590) |
| | | (SEQ ID NO: 416) | | | | |
| Ab67 | YTFTSYYMH | IINPSGGSTTYAQKF | ARPGKSMDV | RASQSVSSYLA | DASNRAT | QQRSHFPIT |
| | (SEQ ID NO: 381) | QG | (SEQ ID NO: 463) | (SEQ ID NO: 498) | (SEQ ID NO: 518) | (SEQ ID NO: 591) |
| | | (SEQ ID NO: 405) | | | | |
| Ab68 | FTFSSYGMH | LIWYDGSNKYYAD | AKPGSMTDY | RASQSVSSYLA | DASNRAT | QQRANYPIT |
| | (SEQ ID NO: 390) | SVKG | (SEQ ID NO: 477) | (SEQ ID NO: 498) | (SEQ ID NO: 518) | (SEQ ID NO: 592) |
| | | (SEQ ID NO: 414) | | | | |
| Ab69 | YTFTGSYMH | WINPNSGGTNYAQ | ARAKSVDHDY | RASQSVSSYLA | DASNRAT | QQRADYPIT |
| | (SEQ ID NO: 393) | K FQG | (SEQ ID NO: 478) | (SEQ ID NO: 498) | (SEQ ID NO: 518) | (SEQ ID NO: 593) |
| | | (SEQ ID NO: 416) | | | | |
| Ab70 | YTFTGYYMH | WINPNSGGTSYAQ | ARASKMGDD | RASQSVSSYLA | DASNRAT | QQRSVYPIT |
| | (SEQ ID NO: 394) | K FQG | (SEQ ID NO: 470) | (SEQ ID NO: 498) | (SEQ ID NO: 518) | (SEQ ID NO: 580) |
| | | (SEQ ID NO: 418) | | | | |
| Ab71 | YTFTSYYMH | IINPSGGSTSYAQKF | ARDISTHDYDLAFDI | RASQSVSSSYLA | GASNRAT | QQAGSHPFT |
| | (SEQ ID NO: 381) | QG | (SEQ ID NO: 479) | (SEQ ID NO: 497) | (SEQ ID NO: 524) | (SEQ ID NO: 594) |
| | | (SEQ ID NO: 403) | | | | |
| Ab72 | GSISSYYWS | SIYYSGSTNYNPSLK | ARSGTETLFDY | QASQDITNYLN | DASNLET | QQDVNYPPT |
| | (SEQ ID NO: 389) | S | (SEQ ID NO: 480) | (SEQ ID NO: 507) | (SEQ ID NO: 520) | (SEQ ID NO: 595) |
| | | (SEQ ID NO: 412) | | | | |
| Ab73 | YSFTSYWIG | IIYPGDSDTTYSPSFQ | ARAKMLDDGYAFDI | RASQSVSSNLA | GASTRAT | QQDDNYPYT |
| | (SEQ ID NO: 383) | G | (SEQ ID NO: 481) | (SEQ ID NO: 494) | (SEQ ID NO: 512) | (SEQ ID NO: 596) |
| | | (SEQ ID NO: 407) | | | | |
| Ab74 | YTFTGSYMH | WINPNSGGTNYAQ | ARAGHKTHDY | RASQSVSSYLA | DASNRAT | QQRSTFPIT |
| | (SEQ ID NO: 393) | K FQG | (SEQ ID NO: 476) | (SEQ ID NO: 498) | (SEQ ID NO: 518) | (SEQ ID NO: 597) |
| | | (SEQ ID NO: 416) | | | | |
| Ab75 | YTFTGYYMH | WINPNSGGTNYAQ | ARDLGYSSLLALDI | RASQSVSSYLA | DASNRAT | QQVSNYPFT |
| | (SEQ ID NO: 394) | K FQG | (SEQ ID NO: 482) | (SEQ ID NO: 498) | (SEQ ID NO: 518) | (SEQ ID NO: 598) |
| | | (SEQ ID NO: 416) | | | | |
| Ab76 | FTFSSYSMN | SISSSSSYIYYADSVK | ARGGGRRGDNNWF | KSSQSVLYSSNN | WASTRES | QQYHDAPIT |
| | (SEQ ID NO: 397) | G | DP | KNYLA | (SEQ ID NO: 521) | (SEQ ID NO: 599) |
| | | (SEQ ID NO: 420) | (SEQ ID NO: 483) | (SEQ ID NO: 501) | | |
| Ab77 | FTFSSYGMH | VISYDGSNKYYADS | ARGPPHEMDY | KSSQSVLYSSNN | WASTRES | QQAYVVPPT |
| | (SEQ ID NO: 390) | VKG | KNYLA | (SEQ ID NO: 501) | (SEQ ID NO: 521) | (SEQ ID NO: 600) |
| | | (SEQ ID NO: 413) | (SEQ ID NO: 484) | | | |
| Ab78 | FTFSSYGMH | VIWYDGSNKYYA | ARTPYPWIYFDL | RASQSVSSYLA | DASNRAT | QQADNWPFT |
| | (SEQ ID NO: 390) | DS VKG | (SEQ ID NO: 485) | (SEQ ID NO: 498) | (SEQ ID NO: 518) | (SEQ ID NO: 601) |
| | | (SEQ ID NO: 415) | | | | |
| Ab79 | FTFSSYSMN | YISGSSSTIYYADSV | ARGGRRHYGGMDV | RSSQSLLHSNGY | LGSHRAS | MQALESPRT |
| | (SEQ ID NO: 397) | KG | NYLD | (SEQ ID NO: 508) | (SEQ ID NO: 525) | (SEQ ID NO: 602) |
| | | (SEQ ID NO: 421) | (SEQ ID NO: 486) | | | |
| Ab80 | GTFSSYAIS | GIIPIFGTANYAQKF | ARGGGTFWSGSWA | RASQSVSSYLA | DASNRAT | QQYVNWPFT |
| | (SEQ ID NO: 379) | QG | LY | (SEQ ID NO: 498) | (SEQ ID NO: 518) | (SEQ ID NO: 603) |
| | | (SEQ ID NO: 401) | (SEQ ID NO: 487) | | | |
| Ab81 | GTFSSYAIS | GIIPIFGTANYAQKF | ARDSGNYDYWSGA | RASQSVSSYLA | DASNRAT | QQSSNWPWT |
| | (SEQ ID NO: 379) | QG | LRY | (SEQ ID NO: 498) | (SEQ ID NO: 518) | (SEQ ID NO: 604) |
| | | (SEQ ID NO: 401) | (SEQ ID NO: 488) | | | |
| Ab82 | GSISSGGYYWS | YIYYSGSTVYNPSLK | ARVSSSWYKA | RASQGISSWLA | AASSLQS | QQASTFPIT |
| | (SEQ ID NO: 387) | S | (SEQ ID NO: 489) | (SEQ ID NO: 509) | (SEQ ID NO: 519) | (SEQ ID NO: 605) |
| | | (SEQ ID NO: 422) | | | | |
| Ab83 | GSFSGYYWS | EIDHSGSTKYNPSLK | ARVGVVVGRPGYSA | RASQGISSWLA | AASSLQS | QQRNSLPLT |
| | (SEQ ID NO: 398) | S | FDI | (SEQ ID NO: 509) | (SEQ ID NO: 519) | (SEQ ID NO: 606) |
| | | (SEQ ID NO: 423) | (SEQ ID NO: 490) | | | |
| Ab84 | YTFTSYGIS | WISTYNGNTNYAQ | ARGSGSGYDSWYD | RASQSISSYLN | AASSLQS | QQSYDFPIT |
| | (SEQ ID NO: 386) | K LQG | (SEQ ID NO: 473) | (SEQ ID NO: 499) | (SEQ ID NO: 519) | (SEQ ID NO: 607) |
| | | (SEQ ID NO: 419) | | | | |
| Ab85 | FTFSSYGMH | VIWYDGSNKYYAD | AKDLGGYYGGAAY | RASQDISSWLA | AASSLQS | QQEVDYPPLT |
| | (SEQ ID NO: 390) | SVKG | GMDV | (SEQ ID NO: 510) | (SEQ ID NO: 519) | (SEQ ID NO: 608) |
| | | (SEQ ID NO: 415) | (SEQ ID NO: 491) | | | |
| Ab86 | FTFSSYGMH | VISYDGSNKYYADS | AKDGVYYGLGNWF | RASQSISSWLA | KASSLES | QQLNSYSPT |
| | (SEQ ID NO: 390) | VKG | DP | (SEQ ID NO: 505) | (SEQ ID NO: 526) | (SEQ ID NO: 609) |
| | | (SEQ ID NO: 413) | (SEQ ID NO: 492) | | | |
| Ab87 | GSISSYYWS | SIYYSGSTNYNPSLK | ARHGWDRVGWFDP | RASQSVSRYLA | DASNRAT | QQYIFWPPT |
| | (SEQ ID NO: 389) | S | (SEQ ID NO: 493) | (SEQ ID NO: 511) | (SEQ ID NO: 518) | (SEQ ID NO: 610) |
| | | (SEQ ID NO: 412) | | | | |

TABLE 6D
Heavy chain variable regions

| | | |
|---|---|---|
| Ab 1 | SEQ ID NO: 616 | EVQLLESGGGLVQPGGSLRLSCAASGFTFSSYAMSWVRQAPGKGLEWVSVISGSGGSTYY |
| | | ADSVKGRFTISRDNSKNTLYLQMNSLRAEDTAVYYCAKGTPTLLFQHWGQGTLVTVSS |
| Ab 2 | SEQ ID NO: 618 | EVQLLESGGGLVQPGGSLRLSCAASGFTFSSSAMSWVRQAPGKGLEWVSAISGSGGSTYY |
| | | ADSVKGRFTISRDNSKNTLYLQMNSLRAEDTAVYYCAKVPSYDYWSGYSNYYYYMDVWGK |
| | | GTTVTVSS |
| Ab 3 | SEQ ID NO: 620 | QVQLVQSGAEVKKPGSSVKVSCKASGGTFSSYAISWVRQAPGQGLEWMGGIIPIFGTANY |
| | | AQKFQGRVTITADESTSTAYMELSSLRSEDTAVYYCAREQYHVGMDVWGKGTTVTVSS |
| Ab 4 | SEQ ID NO: 622 | QVQLVQSGAEVKKPGSSVKVSCKASGGTFSSYAISWVRQAPGQGLEWMGGIIPIFGTASY |
| | | AQKFQGRVTITADESTSTAYMELSSLRSEDTAVYYCARGVDSIMDYWGQGTLVTVSS |
| Ab 5 | SEQ ID NO: 624 | QVQLVQSGAEVKKPGASVKVSCKASGYTFTSYYIHWVRQAPGQGLEWMGIINPSGGSTSY |
| | | AQKFQGRVTMTRDTSTSTVYMELSSLRSEDTAVYYCARAPQESPYVFDIWGQGTMVTVSS |
| Ab 6 | SEQ ID NO: 626 | QVQLVQSGAEVKKPGASVKVSCKASGYTFTSYYMHWVRQAPGQGLEWMGIINPGGGSTSY |
| | | AQKFQGRVTMTRDTSTSTVYMELSSLRSEDTAVYYCARGSPTYGYLYDPWGQGTLVTVSS |
| Ab 7 | SEQ ID NO: 628 | QVQLVQSGAEVKKPGASVKVSCKASGYTFTSYYMHWVRQAPGQGLEWMGIINPSGGSTTY |
| | | AQKFQGRVTMTRDTSTSTVYMELSSLRSEDTAVYYCARTSSKERDYWGQGTLVTVSS |
| Ab 8 | SEQ ID NO: 630 | QLQLQESGPGLVKPSETLSLTCTVSGGSISSSSYYWGWIRQPPGKGLEWIGSISYSGSTY |
| | | YNPSLKSRVTISVDTSKNQFSLKLSSVTAADTAVYYCARGPYRLLLGMDVWGQGTTVTVSS |
| Ab 9 | SEQ ID NO: 632 | EVQLVQSGAEVKKPGESLKISCKGSGYSFTSYWIGWVRQMPGKGLEWMGIIYPGDSDTTY |
| | | SPSFQGQVTISADKSISTAYLQWSSLKASDTAMYYCARLHISGEVNWFDPWGQGTLVTVSS |
| Ab 10 | SEQ ID NO: 634 | EVQLVQSGAEVKKPGESLKISCKGSGYSFTSNWIGWVRQMPGKGLEWMGIIYPGDSDTRY |
| | | SPSFQGQVTISADKSISTAYLQWSSLKASDTAMYYCAREAGYDYGELAFDIWGQGTMVTVSS |
| Ab 11 | SEQ ID NO: 636 | EVQLVQSGAEVKKPGESLKISCKGSGYSFTTYWIGWVRQMPGKGLEWMGIIYPGDSDTRY |
| | | SPSFQGQVTISADKSISTAYLQWSSLKASDTAMYYCARAGHYDGGHLGMDVWGQGTTVTVSS |
| Ab 12 | SEQ ID NO: 638 | EVQLVQSGAEVKKPGESLKISCKGSGYSFTSYWIGWVRQMPGKGLEWMGIIYPGDSDTRY |
| | | SPSFQGQVTISADKSISTAYLQWSSLKASDTAMYYCARLGHYSGTVSSYGMDVWGQGTTV |
| | | TVSS |
| Ab 13 | SEQ ID NO: 640 | QVQLVQSGAEVKKPGASVKVSCKASGYTFTSYGISWVRQAPGQGLEWMGWISAYNGNTNY |
| | | AQKLQGRVTMTTDTSTSTAYMELRSLRSDDTAVYYCARGPSHYYDLAWGQGTLVTVSS |
| Ab 14 | SEQ ID NO: 642 | QVQLQESGPGLVKPSQTLSLTCTVSGGSISSGGYYWSWIRQHPGKGLEWIGNIYYSGSTV |
| | | YNPSLKSRVTISVDTSKNQFSLKLSSVTAADTAVYYCARGLYGYGVLDVWGQGTMVTVSS |
| Ab 15 | SEQ ID NO: 642 | QVQLQESGPGLVKPSQTLSLTCTVSGGSISSGGYYWSWIRQHPGKGLEWIGNIYYSGSTV |
| | | YNPSLKSRVTISVDTSKNQFSLKLSSVTAADTAVYYCARGLYGYGVLDVWGQGTMVTVSS |
| Ab 16 | SEQ ID NO: 645 | QLQLQESGPGLVKPSETLSLTCTVSGGSISSNSYYWGWIRQPPGKGLEWIGSIYYSGSTY |
| | | YNPSLKSRVTISVDTSKNQFSLKLSSVTAADTAVYYCARGVLGYGVFDYWGQGTLVTVSS |
| Ab 17 | SEQ ID NO: 645 | QLQLQESGPGLVKPSETLSLTCTVSGGSISSNSYYWGWIRQPPGKGLEWIGSIYYSGSTY |
| | | YNPSLKSRVTISVDTSKNQFSLKLSSVTAADTAVYYCARGVLGYGVFDYWGQGTLVTVSS |
| Ab 18 | SEQ ID NO: 648 | QVQLQESGPGLVKPSETLSLTCTVSGGSISSYYWSWIRQPPGKGLEWIGSIYYSGSTNYN |
| | | PSLKSRVTISVDTSKNQFSLKLSSVTAADTAVYYCARDGGGEYPSGTPFDIWGQGTMVTV |
| | | SS |
| Ab 19 | SEQ ID NO: 648 | QVQLQESGPGLVKPSETLSLTCTVSGGSISSYYWSWIRQPPGKGLEWIGSIYYSGSTNYN |
| | | PSLKSRVTISVDTSKNQFSLKLSSVTAADTAVYYCARDGGGEYPSGTPFDIWGQGTMVTV |
| | | SS |
| Ab 20 | SEQ ID NO: 651 | QVQLQESGPGLVKPSETLSLTCTVSGGSISSYYWSWIRQPPGKGLEWIGSIYYSGSTNYN |
| | | PSLKSRVTISVDTSKNQFSLKLSSVTAADTAVYYCARSGMASFFDYWGQGTLVTVSS |
| Ab 22 | SEQ ID NO: 636 | EVQLVQSGAEVKKPGESLKISCKGSGYSFTTYWIGWVRQMPGKGLEWMGIIYPGDSDTRY |
| | | SPSFQGQVTISADKSISTAYLQWSSLKASDTAMYYCARAGHYDGGHLGMDVWGQGTTVTVSS |
| Ab 23 | SEQ ID NO: 654 | EVQLLESGGGLVQPGGSLRLSCAASGFTFSSYAMSWVRQAPGKGLEWVSAISGSGGSTYY |
| | | ADSVKGRFTISRDNSKNTLYLQMNSLRAEDTAVYYCAKLGGHSMDVWGQGTTVTVSS |
| Ab 24 | SEQ ID NO: 656 | EVQLLESGGGLVQPGGSLRLSCAASGFTFSSYAMSWVRQAPGKGLEWVSAISGSGGSTYY |
| | | ADSVKGRFTISRDNSKNTLYLQMNSLRAEDTAVYYCAKPLKRGRGFYWGQGTLVTVSS |
| Ab 25 | SEQ ID NO: 658 | EVQLLESGGGLVQPGGSLRLSCAASGFTFSSYAMSWVRQAPGKGLEWVSVISGSGGSTYY |
| | | ADSVKGRFTISRDNSKNTLYLQMNSLRAEDTAVYYCAKEGRTITMDWGQGTLVTVSS |
| Ab 26 | SEQ ID NO: 660 | EVQLLESGGGLVQPGGSLRLSCAASGFTFSSYAMSWVRQAPGKGLEWVSVISGSGGSTYY |
| | | ADSVKGRFTISRDNSKNTLYLQMNSLRAEDTAVYYCAKDQYSVLDYWGQGTLVTVSS |
| Ab 27 | SEQ ID NO: 662 | EVQLLESGGGLVQPGGSLRLSCAASGFTFSSYAMSWVRQAPGKGLEWVSAISGSGGSTYY |
| | | ADSVKGRFTISRDNSKNTLYLQMNSLRAEDTAVYYCAKKYSSRGVYFDYWGQGTLVTVSS |
| Ab 28 | SEQ ID NO: 664 | EVQLLESGGGLVQPGGSLRLSCAASGFTFSSYAMSWVRQAPGKGLEWVSAISGSGGSTYY |
| | | ADSVKGRFTISRDNSKNTLYLQMNSLRAEDTAVYYCARLGGAVGARHVTYFDYWGQGTLV |
| | | TVSS |
| Ab 29 | SEQ ID NO: 666 | QVQLVESGGGVVQPGRSLRLSCAASGFTFSSYGMHWVRQAPGKGLEWVAVISYDGSNKYY |
| | | ADSVKGRFTISRDNSKNTLYLQMNSLRAEDTAVYYCARGQYYGGSGWFDPWGQGTLVTVSS |
| Ab 30 | SEQ ID NO: 668 | EVQLLESGGGLVQPGGSLRLSCAASGFTFSSYAMSWVRQAPGKGLEWVSAISGSGGSTYY |
| | | ADSVKGRFTISRDNSKNTLYLQMNSLRAEDTAVYYCARLGQEYAYFQHWGQGTLVTVSS |
| Ab 31 | SEQ ID NO: 670 | QVQLVESGGGVVQPGRSLRLSCAASGFTFSSYGMHWVRQAPGKGLEWVALIWYDGSNKYY |
| | | ADSVKGRFTISRDNSKNTLYLQMNSLRAEDTAVYYCARRRDGYYDEVFDIWGQGTMVTVSS |
| Ab 32 | SEQ ID NO: 672 | EVQLLESGGGLVQPGGSLRLSCAASGFTFSSYAMSWVRQAPGKGLEWVSAISGSGGSTYY |
| | | ADSVKGRFTISRDNSKNTLYLQMNSLRAEDTAVYYCARVPKHYVVLDYWGQGTLVTVSS |
| Ab 33 | SEQ ID NO: 674 | QVQLVESGGGVVQPGRSLRLSCAASGFTFSSYGMHWVRQAPGKGLEWVAVISYDGSNKYY |
| | | ADSVKGRFTISRDNSKNTLYLQMNSLRAEDTAVYYCARAGGHLFDYWGQGTLVTVSS |
| Ab 34 | SEQ ID NO: 676 | QVQLVESGGGVVQPGRSLRLSCAASGFTFSSYGMHWVRQAPGKGLEWVAVISYDGSNKYY |
| | | ADSVKGRFTISRDNSKNTLYLQMNSLRAEDTAVYYCARDRGGEYVDFAFDIWGQGTMVTVSS |
| Ab 35 | SEQ ID NO: 678 | EVQLLESGGGLVQPGGSLRLSCAASGFTFSSYAMSWVRQAPGKGLEWVSAISGSGGSTYY |
| | | ADSVKGRFTISRDNSKNTLYLQMNSLRAEDTAVYYCARTRSGYGASNYFDYWGQGTLVTVSS |
| Ab 36 | SEQ ID NO: 680 | QVQLVESGGGVVQPGRSLRLSCAASGFTFSTYGMHWVRQAPGKGLEWVAVIWYDGSNKYY |
| | | ADSVKGRFTISRDNSKNTLYLQMNSLRAEDTAVYYCARGTGAAAASPAFDIWGQGTMVTVSS |
| Ab 37 | SEQ ID NO: 682 | EVQLLESGGGLVQPGGSLRLSCAASGFTFSSYAMSWVRQAPGKGLEWVSAISGSGGSTYY |
| | | ADSVKGRFTISRDNSKNTLYLQMNSLRAEDTAVYYCARVGQYMLGMDVWGQGTTVTVSS |
| Ab 38 | SEQ ID NO: 684 | QVQLVESGGGVVQPGRSLRLSCAASGFTFSTYGMHWVRQAPGKGLEWVAVIWYDGSNKYY |
| | | ADSVKGRFTISRDNSKNTLYLQMNSLRAEDTAVYYCARGAPVDYGGIEPEYFQHWGQGTL |
| | | VTVSS |
| Ab 39 | SEQ ID NO: 686 | EVQLLESGGGLVQPGGSLRLSCAASGFTFSSYAMSWVRQAPGKGLEWVSAISGSGGSTYY |
| | | ADSVKGRFTISRDNSKNTLYLQMNSLRAEDTAVYYCAKHYHVGIAFDIWGQGTMVTVSS |
| Ab 40 | SEQ ID NO: 678 | EVQLLESGGGLVQPGGSLRLSCAASGFTFSSYAMSWVRQAPGKGLEWVSAISGSGGSTYY |
| | | ADSVKGRFTISRDNSKNTLYLQMNSLRAEDTAVYYCARTRSGYGASNYFDYWGQGTLVTVSS |
| Ab 41 | SEQ ID NO: 689 | EVQLLESGGGLVQPGGSLRLSCAASGFTFSTYAMSWVRQAPGKGLEWVSAISGSGGSTYY |
| | | ADSVKGRFTISRDNSKNTLYLQMNSLRAEDTAVYYCARAMARKSVAFDIWGQGTMVTVSS |
| Ab 42 | SEQ ID NO: 691 | EVQLLESGGGLVQPGGSLRLSCAASGFTFSSSAMSWVRQAPGKGLEWVSAISGSGGSTYY |
| | | ADSVKGRFTISRDNSKNTLYLQMNSLRAEDTAVYYCAKVPSYQRGTAFDPWGQGTLVTVSS |
| Ab 43 | SEQ ID NO: 693 | EVQLLESGGGLVQPGGSLRLSCAASGFTFSSSAMSWVRQAPGKGLEWVSAISGSGGSTYY |
| | | ADSVKGRFTISRDNSKNTLYLQMNSLRAEDTAVYYCAKSPAVAGIYRADYWGQGTLVTVSS |
| Ab 44 | SEQ ID NO: 680 | QVQLVESGGGVVQPGRSLRLSCAASGFTFSTYGMHWVRQAPGKGLEWVAVIWYDGSNKYY |
| | | ADSVKGRFTISRDNSKNTLYLQMNSLRAEDTAVYYCARGTGAAAASPAFDIWGQGTMVTVSS |
| Ab 45 | SEQ ID NO: 696 | QVQLVQSGAEVKKPGASVKVSCKASGYTFTSYYMHWVRQAPGQGLEWMGIINPSGGSTSY |
| | | AQKFQGRVTMTRDTSTSTVYMELSSLRSEDTAVYYCARGPGYTTALDYYYMDVWGKGTTV |
| | | TVSS |
| Ab 46 | SEQ ID NO: 698 | QVQLVQSGAEVKKPGASVKVSCKASGYTFTSYYMHWVRQAPGQGLEWMGIINPSGGSTSY |
| | | AQKFQGRVTMTRDTSTSTVYMELSSLRSEDTAVYYCARPAKTADYWGQGTLVTVSS |
| Ab 47 | SEQ ID NO: 700 | QVQLVQSGAEVKKPGASVKVSCKASGYTFTSYYMHWVRQAPGQGLEWMGIINPSGGSTTY |
| | | AQKFQGRVTMTRDTSTSTVYMELSSLRSEDTAVYYCARPGKSMDVWGQGTTVTVSS |
| Ab 48 | SEQ ID NO: 700 | QVQLVQSGAEVKKPGASVKVSCKASGYTFTSYYMHWVRQAPGQGLEWMGIINPSGGSTTY |
| | | AQKFQGRVTMTRDTSTSTVYMELSSLRSEDTAVYYCARPGKSMDVWGQGTTVTVSS |
| Ab 49 | SEQ ID NO: 698 | QVQLVQSGAEVKKPGASVKVSCKASGYTFTSYYMHWVRQAPGQGLEWMGIINPSGGSTSY |
| | | AQKFQGRVTMTRDTSTSTVYMELSSLRSEDTAVYYCARPAKTADYWGQGTLVTVSS |
| Ab 50 | SEQ ID NO: 624 | QVQLVQSGAEVKKPGASVKVSCKASGYTFTSYYIHWVRQAPGQGLEWMGIINPSGGSTSY |
| | | AQKFQGRVTMTRDTSTSTVYMELSSLRSEDTAVYYCARAPQESPYVFDIWGQGTMVTVSS |
| Ab 51 | SEQ ID NO: 705 | QVQLVQSGAEVKKPGASVKVSCKASGYTFTSYYMHWVRQAPGQGLEWMGIINPSGGSTSY |
| | | AQKFQGRVTMTRDTSTSTVYMELSSLRSEDTAVYYCARGVGGQDYYYMDVWGKGTTVTVSS |
| Ab 53 | SEQ ID NO: 624 | QVQLVQSGAEVKKPGASVKVSCKASGYTFTSYYIHWVRQAPGQGLEWMGIINPSGGSTSY |
| | | AQKFQGRVTMTRDTSTSTVYMELSSLRSEDTAVYYCARAPQESPYVFDIWGQGTMVTVSS |
| Ab 54 | SEQ ID NO: 696 | QVQLVQSGAEVKKPGASVKVSCKASGYTFTSYYMHWVRQAPGQGLEWMGIINPSGGSTSY |
| | | AQKFQGRVTMTRDTSTSTVYMELSSLRSEDTAVYYCARGPGYTTALDYYYMDVWGKGTTV |
| | | TVSS |
| Ab 55 | SEQ ID NO: 709 | QVQLVQSGAEVKKPGASVKVSCKASGYTFTGSYMHWVRQAPGQGLEWMGWINPNSGGTNY |
| | | AQKFQGRVTMTRDTSISTAYMELSRLRSDDTAVYYCARGPLYHPMIFDYWGQGTLVTVSS |
| Ab 56 | SEQ ID NO: 711 | QVQLVQSGAEVKKPGASVKVSCKASGYTFTGYYMHWVRQAPGQGLEWMGSINPNSGGTNY |
| | | AQKFQGRVTMTRDTSISTAYMELSRLRSDDTAVYYCARASSVDNWGQGTLVTVSS |
| Ab 57 | SEQ ID NO: 713 | QVQLVQSGAEVKKPGASVKVSCKASGYTFTNYGISWVRQAPGQGLEWMGWISAYNGNTNY |
| | | AQKLQGRVTMTTDTSTSTAYMELRSLRSDDTAVYYCARGPTKAYYGSGSYVVFDPWGQGT |
| | | LVTVSS |
| Ab 58 | SEQ ID NO: 715 | EVQLVQSGAEVKKPGESLKISCKGSGYSFTSYWIGWVRQMPGKGLEWMGIIYPGDSDTRY |
| | | SPSFQGQVTISADKSISTAYLQWSSLKASDTAMYYCARLGIYSTGATAFDIWGQGTMVTVSS |
| Ab 59 | SEQ ID NO: 717 | QVQLVQSGAEVKKPGASVKVSCKASGYTFTGSYMHWVRQAPGQGLEWMGWINPNSGGTNY |
| | | AQKFQGRVTMTRDTSISTAYMELSRLRSDDTAVYYCARGGVWYSLFDIWGQGTMVTVSS |
| Ab 60 | SEQ ID NO: 719 | QVQLVQSGAEVKKPGASVKVSCKASGYTFTGYYMHWVRQAPGQGLEWMGWINPNSGGTSY |
| | | AQKFQGRVTMTRDTSISTAYMELSRLRSDDTAVYYCARASKMGDDWGQGTLVTVSS |
| Ab 61 | SEQ ID NO: 721 | QVQLVQSGAEVKKPGASVKVSCKASGYTFTSYGIHWVRQAPGQGLEWMGWISAYNGNTNY |
| | | AQKLQGRVTMTTDTSTSTAYMELRSLRSDDTAVYYCARGGVPRVSYFQHWGQGTLVTVSS |
| Ab 62 | SEQ ID NO: 723 | EVQLVQSGAEVKKPGESLKISCKGSGYSFTSYWIGWVRQMPGKGLEWMGIIYPGDSDTRY |
| | | SPSFQGQVTISADKSISTAYLQWSSLKASDTAMYYCARAGHYDDWSGLGLDVWGQGTMVTVSS |
| Ab 63 | SEQ ID NO: 725 | QVQLVQSGAEVKKPGASVKVSCKASGYTFTSYGISWVRQAPGQGLEWMGWISTYNGNTNY |
| | | AQKLQGRVTMTTDTSTSTAYMELRSLRSDDTAVYYCARGSGSGYDSWYDWGQGTLVTVSS |
| Ab 64 | SEQ ID NO: 727 | EVQLVQSGAEVKKPGESLKISCKGSGYSFTSYWIGWVRQMPGKGLEWMGIIYPGDSDTRY |
| | | SPSFQGQVTISADKSISTAYLQWSSLKASDTAMYYCARLGRWSSGSTAFDIWGQGTMVTVSS |
| Ab 65 | SEQ ID NO: 729 | EVQLVQSGAEVKKPGESLKISCKGSGYSFTSYWIGWVRQMPGKGLEWMGIIYPGDSDTRY |
| | | SPSFQGQVTISADKSISTAYLQWSSLKASDTAMYYCARLGRKPSGSVAFDIWGQGTMVTVSS |
| Ab 66 | SEQ ID NO: 731 | QVQLVQSGAEVKKPGASVKVSCKASGYTFTGSYMHWVRQAPGQGLEWMGWINPNSGGTNY |
| | | AQKFQGRVTMTRDTSISTAYMELSRLRSDDTAVYYCARAGHKTHDYWGQGTLVTVSS |
| Ab 67 | SEQ ID NO: 700 | QVQLVQSGAEVKKPGASVKVSCKASGYTFTSYYMHWVRQAPGQGLEWMGIINPSGGSTTY |
| | | AQKFQGRVTMTRDTSTSTVYMELSSLRSEDTAVYYCARPGKSMDVWGQGTTVTVSS |
| Ab 68 | SEQ ID NO: 734 | QVQLVESGGGVVQPGRSLRLSCAASGFTFSSYGMHWVRQAPGKGLEWVALIWYDGSNKYY |
| | | ADSVKGRFTISRDNSKNTLYLQMNSLRAEDTAVYYCAKPGSMTDYWGQGTLVTVSS |
| Ab 69 | SEQ ID NO: 736 | QVQLVQSGAEVKKPGASVKVSCKASGYTFTGSYMHWVRQAPGQGLEWMGWINPNSGGTNY |
| | | AQKFQGRVTMTRDTSISTAYMELSRLRSDDTAVYYCARAKSVDHDYWGQGTLVTVSS |
| Ab 70 | SEQ ID NO: 719 | QVQLVQSGAEVKKPGASVKVSCKASGYTFTGYYMHWVRQAPGQGLEWMGWINPNSGGTSY |
| | | AQKFQGRVTMTRDTSISTAYMELSRLRSDDTAVYYCARASKMGDDWGQGTLVTVSS |
| Ab 71 | SEQ ID NO: 739 | QVQLVQSGAEVKKPGASVKVSCKASGYTFTSYYMHWVRQAPGQGLEWMGIINPSGGSTSY |
| | | AQKFQGRVTMTRDTSTSTVYMELSSLRSEDTAVYYCARDISTHDYDLAFDIWGQGTMVTVSS |
| Ab 72 | SEQ ID NO: 741 | QVQLQESGPGLVKPSETLSLTCTVSGGSISSYYWSWIRQPPGKGLEWIGSIYYSGSTNYN |
| | | PSLKSRVTISVDTSKNQFSLKLSSVTAADTAVYYCARSGTETLFDYWGQGTLVTVSS |
| Ab 73 | SEQ ID NO: 743 | EVQLVQSGAEVKKPGESLKISCKGSGYSFTSYWIGWVRQMPGKGLEWMGIIYPGDSDTTY |
| | | SPSFQGQVTISADKSISTAYLQWSSLKASDTAMYYCARAKMLDDGYAFDIWGQGTMVTVSS |
| Ab 74 | SEQ ID NO: 731 | QVQLVQSGAEVKKPGASVKVSCKASGYTFTGSYMHWVRQAPGQGLEWMGWINPNSGGTNY |
| | | AQKFQGRVTMTRDTSISTAYMELSRLRSDDTAVYYCARAGHKTHDYWGQGTLVTVSS |
| Ab 75 | SEQ ID NO: 746 | QVQLVQSGAEVKKPGASVKVSCKASGYTFTGYYMHWVRQAPGQGLEWMGWINPNSGGTNY |
| | | AQKFQGRVTMTRDTSISTAYMELSRLRSDDTAVYYCARDLGYSSLLALDIWGQGTMVTVSS |
| Ab 76 | SEQ ID NO: 748 | EVQLVESGGGLVKPGGSLRLSCAASGFTFSSYSMNWVRQAPGKGLEWVSSISSSSSYIYY |
| | | ADSVKGRFTISRDNAKNSLYLQMNSLRAEDTAVYYCARGGGRRGDNNWFDPWGQGTLVTVSS |
| Ab 77 | SEQ ID NO: 750 | QVQLVESGGGVVQPGRSLRLSCAASGFTFSSYGMHWVRQAPGKGLEWVAVISYDGSNKYY |
| | | ADSVKGRFTISRDNSKNTLYLQMNSLRAEDTAVYYCARGPPHEMDYWGQGTLVTVSS |
| Ab 78 | SEQ ID NO: 752 | QVQLVESGGGVVQPGRSLRLSCAASGFTFSSYGMHWVRQAPGKGLEWVAVIWYDGSNKYY |
| | | ADSVKGRFTISRDNSKNTLYLQMNSLRAEDTAVYYCARTPYPWIYFDLWGRGTLVTVSS |
| Ab 79 | SEQ ID NO: 754 | EVQLVESGGGLVQPGGSLRLSCAASGFTFSSYSMNWVRQAPGKGLEWVSYISGSSSTIYY |
| | | ADSVKGRFTISRDNAKNSLYLQMNSLRAEDTAVYYCARGGRRHYGGMDVWGQGTTVTVSS |
| Ab 80 | SEQ ID NO: 756 | QVQLVQSGAEVKKPGSSVKVSCKASGGTFSSYAISWVRQAPGQGLEWMGGIIPIFGTANY |
| | | AQKFQGRVTITADESTSTAYMELSSLRSEDTAVYYCARGGGTFWSGSWALYWGQGTLVTVSS |
| Ab 81 | SEQ ID NO: 758 | QVQLVQSGAEVKKPGSSVKVSCKASGGTFSSYAISWVRQAPGQGLEWMGGIIPIFGTANY |
| | | AQKFQGRVTITADESTSTAYMELSSLRSEDTAVYYCARDSGNYDYWSGALRYWGQGTLVTVSS |
| Ab 82 | SEQ ID NO: 760 | QVQLQESGPGLVKPSQTLSLTCTVSGGSISSGGYYWSWIRQHPGKGLEWIGYIYYSGSTV |
| | | YNPSLKSRVTISVDTSKNQFSLKLSSVTAADTAVYYCARVSSSWYKAWGQGTMVTVSS |
| Ab 83 | SEQ ID NO: 762 | QVQLQQWGAGLLKPSETLSLTCAVYGGSFSGYYWSWIRQPPGKGLEWIGEIDHSGSTKYN |
| | | PSLKSRVTISVDTSKNQFSLKLSSVTAADTAVYYCARVGVVVGRPGYSAFDIWGQGTMVTVSS |
| Ab 84 | SEQ ID NO: 725 | QVQLVQSGAEVKKPGASVKVSCKASGYTFTSYGISWVRQAPGQGLEWMGWISTYNGNTNY |
| | | AQKLQGRVTMTTDTSTSTAYMELRSLRSDDTAVYYCARGSGSGYDSWYDWGQGTLVTVSS |
| Ab 85 | SEQ ID NO: 765 | QVQLVESGGGVVQPGRSLRLSCAASGFTFSSYGMHWVRQAPGKGLEWVAVIWYDGSNKYY |
| | | ADSVKGRFTISRDNSKNTLYLQMNSLRAEDTAVYYCAKDLGGYYGGAAYGMDVWGQGTTV |
| | | TVSS |
| Ab 86 | SEQ ID NO: 767 | QVQLVESGGGVVQPGRSLRLSCAASGFTFSSYGMHWVRQAPGKGLEWVAVISYDGSNKYY |
| | | ADSVKGRFTISRDNSKNTLYLQMNSLRAEDTAVYYCAKDGVYYGLGNWFDPWGQGTLVTVSS |
| Ab 87 | SEQ ID NO: 769 | QVQLQESGPGLVKPSETLSLTCTVSGGSISSYYWSWIRQPPGKGLEWIGSIYYSGSTNYN |
| | | PSLKSRVTISVDTSKNQFSLKLSSVTAADTAVYYCARHGWDRVGWFDPWGQGTLVTVSS |

TABLE 6E
Light chain variable regions

| | | |
|---|---|---|
| Ab 1 | SEQ ID NO: 617 | EIVMTQSPATLSVSPGERATLSCRASQSVSSNLAWYQQKPGQAPRLLIYGASTRATGIPA |
| | | RFSGSGSGTEFTLTISSLQSEDFAVYYCQQLPYWPPTFGGGTKVEIK |
| Ab 2 | SEQ ID NO: 619 | EIVLTQSPATLSVSPGERATLSCRASQSVGSNLAWYQQKPGQAPRLLIYGASTRATGIPA |
| | | RFSGSGSGTEFTLTISSLQSEDFAVYYCQQYFFYPPTFGGGTKVEIK |
| Ab 3 | SEQ ID NO: 621 | DIQMTQSPSSLSASVGDRVTITCQASQDISNYLNWYQQKPGKAPKLLIYDASNLATGVPS |
| | | RFSGSGSGTDFTFTISSLQPEDIATYYCQQPFNFPYTFGGGTKVEIK |
| Ab 4 | SEQ ID NO: 623 | EIVMTQSPATLSVSPGERATLSCRASQSVSSNLAWYQQKPGQAPRLLIYSASTRATGIPA |
| | | RFSGSGSGTEFTLTISSLQSEDFAVYYCQQDHDYPFTFGGGTKVEIK |
| Ab 5 | SEQ ID NO: 625 | EIVMTQSPGTLSLSPGERATLSCRASQSVSSSYLAWYQQKPGQAPRLLIYGASSRATGIP |
| | | DRFSGSGSGTDFTLTISRLEPEDFAVYYCQQYFSSPFTFGGGTKVEIK |
| Ab 6 | SEQ ID NO: 627 | EIVLTQSPATLSLSPGERATLSCRASQSVSSYLAWYQQKPGQAPRLLIYDASKRATGIPA |
| | | RFSGSGSGTDFTLTISSLEPEDFAVYYCQQRVNLPPTFGGGTKVEIK |
| Ab 7 | SEQ ID NO: 629 | EIVLTQSPATLSLSPGERATLSCRASQSVSSYLAWYQQKPGQAPRLLIYDASKRATGIPA |
| | | RFSGSGSGTDFTLTISSLEPEDFAVYYCQQRISYPITFGGGTKVEIK |
| Ab 8 | SEQ ID NO: 631 | DIQMTQSPSSLSASVGDRVTITCRASQSISSYLNWYQQKPGKAPKLLIYGASSLQSGVPS |
| | | RFSGSGSGTDFTLTISSLQPEDFATYYCQQIDDTPITFGGGTKVEIK |
| Ab 9 | SEQ ID NO: 633 | EIVLTQSPATLSLSPGERATLSCRASQSVSSYLAWYQQKPGQAPRLLIYDASNRATGIPA |
| | | RFSGSGSGTDFTLTISSLEPEDFAVYYCQQFSYWPWTFGGGTKVEIK |
| Ab 10 | SEQ ID NO: 635 | EIVLTQSPGTLSLSPGERATLSCRASQSVSSSYLAWYQQKPGQAPRLLIYGASSRATGIP |
| | | DRFSGSGSGTDFTLTISRLEPEDFAVYYCQQHDSSPPTFGGGTKVEIK |
| Ab 11 | SEQ ID NO: 637 | EIVLTQSPGTLSLSPGERATLSCRASQSVSSDYLAWYQQKPGQAPRLLIYGASSRATGIP |
| | | DRFSGSGSGTDFTLTISRLEPEDFAVYYCQQDYSYPWTFGGGTKVEIK |
| Ab 12 | SEQ ID NO: 639 | DIQMTQSPSSLSASVGDRVTITCRASQSISSYLNWYQQKPGKAPKLLIYAASSLQSGVPS |
| | | RFSGSGSGTDFTLTISSLQPEDFATYYCQQEYAVPYTFGGGTKVEIK |
| Ab 13 | SEQ ID NO: 641 | EIVLTQSPATLSLSPGERATLSCRASQSVSSYLAWYQQKPGQAPRLLIYDASNRATGIPA |
| | | RFSGSGSGTDFTLTISSLEPEDFAVYYCQQVSNYPITFGGGTKVEIK |
| Ab 14 | SEQ ID NO: 643 | DIQMTQSPSSLSASVGDRVTITCQASQDISNYLNWYQQKPGKAPKLLIYDASNLETGVPS |
| | | RFSGSGSGTDFTFTISSLQPEDIATYYCQQVDNIPPTFGGGTKVEIK |
| Ab 15 | SEQ ID NO: 644 | DIQMTQSPSSLSASVGDRVTITCQASQDISNYLNWYQQKPGKAPKLLIYDASNLETGVPS |
| | | RFSGSGSGTDFTFTISSLQPEDIATYYCQQFDTYPTFGGGTKVEIK |
| Ab 16 | SEQ ID NO: 646 | DIQMTQSPSSLSASVGDRVTITCQASQDISNYLNWYQQKPGKAPKLLIYDASNLETGVPS |
| | | RFSGSGSGTDFTFTISSLQPEDIATYYCQQFLNFPTFGGGTKVEIK |
| Ab 17 | SEQ ID NO: 647 | DIQMTQSPSSLSASVGDRVTITCQASQDISNYLNWYQQKPGKAPKLLIYDASNLETGVPS |
| | | RFSGSGSGTDFTFTISSLQPEDIATYYCQQFFNFPTFGGGTKVEIK |
| Ab 18 | SEQ ID NO: 649 | DIQMTQSPSSLSASVGDRVTITCQASQDISNYLNWYQQKPGKAPKLLIYDASNLETGVPS |
| | | RFSGSGSGTDFTFTISSLQPEDIATYYCQQFIDLPFTFGGGTKVEIK |
| Ab 19 | SEQ ID NO: 650 | DIQMTQSPSSLSASVGDRVTITCQASQDISNYLNWYQQKPGKAPKLLIYDASNLETGVPS |
| | | RFSGSGSGTDFTFTISSLQPEDIATYYCQQYYDLPFTFGGGTKVEIK |
| Ab 20 | SEQ ID NO: 652 | EIVLTQSPGTLSLSPGERATLSCRASQSVSSDYLAWYQQKPGQAPRLLIYGASSRATGIP |
| | | DRFSGSGSGTDFTLTISRLEPEDFAVYYCQQFSSHPFTFGGGTKVEIK |
| Ab 22 | SEQ ID NO: 653 | EIVMTQSPGTLSLSPGERATLSCRASQSVSSSYLAWYQQKPGQAPRLLIYGASSRATGIP |
| | | DRFSGSGSGTDFTLTISRLEPEDFAVYYCQQDDRSPYTFGGGTKVEIK |
| Ab 23 | SEQ ID NO: 655 | DIVMTQSPDSLAVSLGERATINCKSSQSVLYSSNNKNYLAWYQQKPGQPPKLLISWASTR |
| | | ESGVPDRFSGSGSGTDFTLTISSLQAEDVAVYYCQQAYLPPITFGGGTKVEIK |
| Ab 24 | SEQ ID NO: 657 | DIQMTQSPSSLSASVGDRVTITCRASQSISSYLNWYQQKPGKAPKLLIYAASSLQSGVPS |
| | | RFSGSGSGTDFTLTISSLQPEDFATYYCQQAFSPPPWTFGGGTKVEIK |
| Ab 25 | SEQ ID NO: 659 | EIVLTQSPGTLSLSPGERATLSCRASQSVSSSYLAWYQQKPGQAPRLLIYGASSRATGIP |
| | | DRFSGSGSGTDFTLTISRLEPEDFAVYYCQQDDRSPTFGGGTKVEIK |
| Ab 26 | SEQ ID NO: 661 | EIVLTQSPATLSLSPGERATLSCRASQSVSSYLAWYQQKPGQAPRLLIYDASNRATGIPA |
| | | RFSGSGSGTDFTLTISSLEPEDFAVYYCQQEFDLPFTFGGGTKVEIK |
| Ab 27 | SEQ ID NO: 663 | EIVLTQSPATLSLSPGERATLSCRASQSVSSYLAWYQQKPGQAPRLLIYDASNRATGIPA |
| | | RFSGSGSGTDFTLTISSLEPEDFAVYYCQQYNNFPPTFGGGTKVEIK |
| Ab 28 | SEQ ID NO: 665 | EIVLTQSPATLSLSPGERATLSCRASQSVSSYLAWYQQKPGQAPRLLIYDASKRATGIPA |
| | | RFSGSGSGTDFTLTISSLEPEDFAVYYCQQRYLRPITFGGGTKVEIK |
| Ab 29 | SEQ ID NO: 667 | EIVLTQSPGTLSLSPGERATLSCRASQSVSSSYLAWYQQKPGQAPRLLIYGASSRATGIP |
| | | DRFSGSGSGTDFTLTISRLEPEDFAVYYCQQPGAVPTFGGGTKVEIK |
| Ab 30 | SEQ ID NO: 669 | DIQMTQSPSSLSASVGDRVTITCRASQSISSYLNWYQQKPGKAPKLLIYGASSLQSGVPS |
| | | RFSGSGSGTDFTLTISSLQPEDFATYYCQQVYITPITFGGGTKVEIK |
| Ab 31 | SEQ ID NO: 671 | DIQLTQSPSSLSASVGDRVTITCQASQDISNFLNWYQQKPGKAPKLLIYDASNLETGVPS |
| | | RFSGSGSGTDFTFTISSLQPEDIATYYCQQPVDLPFTFGGGTKVEIK |
| Ab 32 | SEQ ID NO: 673 | EIVLTQSPATLSLSPGERATLSCRASQSVSSYLAWYQQKPGQAPRLLIYDASNRATGIPA |
| | | RFSGSGSGTDFTLTISSLEPEDFAVYYCQQYSFFPPTFGGGTKVEIK |
| Ab 33 | SEQ ID NO: 675 | EIVLTQSPATLSLSPGERATLSCRASQSVSSYLAWYQQKPGQAPRLLIYDASNRATGIPA |
| | | RFSGSGSGTDFTLTISSLEPEDFAVYYCQQDSSFPPTFGGGTKVEIK |
| Ab 34 | SEQ ID NO: 677 | DIQMTQSPSSLSASVGDRVTITCRASQSISSYLNWYQQKPGKAPKLLIYAASSLQSGVPS |
| | | RFSGSGSGTDFTLTISSLQPEDFATYYCQQSDFPPWTFGGGTKVEIK |
| Ab 35 | SEQ ID NO: 679 | DIQMTQSPSSLSASVGDRVTITCRASQSISSYLNWYQQKPGKAPKLLIYAASSLQSGVPS |
| | | RFSGSGSGTDFTLTISSLQPEDFATYYCQQGYSAPITFGGGTKVEIK |
| Ab 36 | SEQ ID NO: 681 | EIVLTQSPATLSLSPGERATLSCRASQSVSSYLAWYQQKPGQAPRLLIYDASNRATGIPA |
| | | RFSGSGSGTDFTLTISSLEPEDFAVYYCQQLFDWPTFGGGTKVEIK |
| Ab 37 | SEQ ID NO: 683 | EIVLTQSPATLSLSPGERATLSCRASQSVSSYLAWYQQKPGQAPRLLIYDASNRATGIPA |
| | | RFSGSGSGTDFTLTISSLEPEDFAVYYCQQRAFLFTFGGGTKVEIK |
| Ab 38 | SEQ ID NO: 685 | EIVLTQSPATLSLSPGERATLSCRASQSVSSYLAWYQQKPGQAPRLLIYDASNRATGIPA |
| | | RFSGSGSGTDFTLTISSLEPEDFAVYYCQQIDFLPYTFGGGTKVEIK |
| Ab 39 | SEQ ID NO: 687 | DIQMTQSPSSLSASVGDRVTITCRASQSISSYLNWYQQKPGKAPKLLIYAASSLQSGVPS |
| | | RFSGSGSGTDFTLTISSLQPEDFATYYCQQVYSPPITFGGGTKVEIK |
| Ab 40 | SEQ ID NO: 688 | DIQMTQSPSSLSASVGDRVTITCRASQSISSYLNWYQQKPGKAPKLLIYAASSLQSGVPS |
| | | RFSGSGSGTDFTLTISSLQPEDFATYYCQQGYAAPITFGGGTKVEIK |
| Ab 41 | SEQ ID NO: 690 | EIVLTQSPATLSLSPGERATLSCRASQSVSSYLAWYQQKPGQAPRLLIYDASNRATGIPA |
| | | RFSGSGSGTDFTLTISSLEPEDFTVYYCQQRYALPITFGGGTKVEIK |
| Ab 42 | SEQ ID NO: 692 | EIVLTQSPGTLSLSPGERATLSCRASQSVSSSYLAWYQQKPGQAPRLLIYGASSRATGIP |
| | | DRFSGSGSGTDFTLTISRLEPEDFAVYYCQQYASPPITFGGGTKVEIK |
| Ab 43 | SEQ ID NO: 694 | DIQMTQSPSSLSASVGDRVTITCRASQSISRYLNWYQQKPGKAPKLLIYAASSLQSGVPS |
| | | RFSGSGSGTDFTLTISSLQPEDFATYYCQQVYSTPITFGGGTKVEIK |
| Ab 44 | SEQ ID NO: 695 | EIVMTQSPATLSLSPGERATLSCRASQSVSSYLAWYQQKPGQAPRLLIYDSSNRATGIPA |
| | | RFSGSGSGTDFTLTISSLEPEDFAVYYCQQLVHWPTFGGGTKVEIK |
| Ab 45 | SEQ ID NO: 697 | EIVMTQSPATLSVSPGERATLSCRASQSVSSNLAWYQQKPGQAPRLLIYGASTRATGIPA |
| | | RFSGSGSGTEFTLTISSLQSEDFAVYYCQQLDDWFTFGGGTKVEIK |
| Ab 46 | SEQ ID NO: 699 | EIVLTQSPATLSLSPGERATLSCRASQSVSSYLAWYQQKPGQAPRLLIYDSSNRATGIPA |
| | | RFSGSGSGTDFTLTISSLEPEDFAVYYCQQRSNYPITFGGGTKVEIK |
| Ab 47 | SEQ ID NO: 701 | EIVLTQSPGTLSLSPGERATLSCRASQSVSSYLAWYQQKPGQAPRLLIYDASNRATGIPA |
| | | RFSGSGSGTDFTLTISSLEPEDFAVYYCQQRILYPITFGGGTKVEIK |
| Ab 48 | SEQ ID NO: 702 | EIVLTQSPATLSLSPGERATLSCRASQSVSSYLAWYQQKPGQAPRLLIYDASNRATGIPA |
| | | RFSGSGSGTDFTLTISSLEPEDFAVYYCQQRAAYPITFGGGTKVEIK |
| Ab 49 | SEQ ID NO: 703 | EIVLTQSPATLSLSPGERATLSCRASQSVSSYLAWYQQKPGQAPRLLIYDASKRATGIPA |
| | | RFSGSGSGTDFTLTISSLEPEDFAVYYCQQRTSHPITFGGGTKVEIK |
| Ab 50 | SEQ ID NO: 704 | EIVLTQSPGTLSLSPGERATLSCRASQSVSSSYLAWYQQKPGQAPRLLIYGASSRATGIP |
| | | DRFSGSGSGTDFTLTISRLEPEDFAVYYCQQYAGSPFTFGGGTKVEIK |
| Ab 51 | SEQ ID NO: 706 | DIQMTQSPSSLSASVGDRVTITCRASQSISSYLNWYQQKPGKAPKLLIYAASSLQSGVPS |
| | | RFSGSGSGTDFTLTISSLQPEDFATYYCQQFDDVFTFGGGTKVEIK |
| Ab 53 | SEQ ID NO: 707 | EIVLTQSPGTLSLSPGERATLSCRASQSVSSSYLAWYQQKPGQAPRLLIYGASSRATGIP |
| | | DRFSGSGSGTDFTLTISRLEPEDFAVYYCQQYVNSPFTFGGGTKVEIK |
| Ab 54 | SEQ ID NO: 708 | DIQMTQSPSSLSASVGDRVTITCRASQSINSYLNWYQQKPGKAPKLLIYAASSLQSGVPS |
| | | RFSGSGSGTDFTLTISSLQPEDFATYYCQQSDDDPFTFGGGTKVEIK |
| Ab 55 | SEQ ID NO: 710 | EIVLTQSPATLSLSPGERATLSCRASQSVSSYLAWYQQKPGQAPRLLIYDASNRATGIPA |
| | | RFSGSGSGTDFTLTISSLEPEDFAVYYCQQLSTYPLTFGGGTKVEIK |
| Ab 56 | SEQ ID NO: 712 | EIVMTQSPATLSLSPGERATLSCRASQSVSSYLAWYQQKPGQAPRLLIYDASNRATGIPA |
| | | RFSGSGSGTDFTLTISSLEPEDFAVYYCQQRSVYPITFGGGTKVEIK |
| Ab 57 | SEQ ID NO: 714 | EIVLTQSPATLSLSPGERATLSCRASQSVSSYLAWYQQKPGQAPRLLIYDASKRATGIPA |
| | | RFSGSGSGTDFTLTISSLEPEDFAVYYCQQVSLFPLTFGGGTKVEIK |
| Ab 58 | SEQ ID NO: 716 | DIQMTQSPSTLSASVGDRVTITCRASQSISSWLAWYQQKPGKAPKLLIYDASSLESGVPS |
| | | RFSGSGSGTEFTLTISSLQPDDFATYYCLDYNSYSPITFGGGTKVEIK |
| Ab 59 | SEQ ID NO: 718 | DIQMTQSPSSLSASVGDRVTITCQASQDISNYLNWYQQKPGKAPKLLIYDASNLETGVPS |
| | | RFSGSGSGTDFTFTISSLQPEDIATYYCQQHIALPFTFGGGTKVEIK |
| Ab 60 | SEQ ID NO: 720 | EIVLTQSPATLSLSPGERATLSCRASQSVSSYLAWYQQKPGQAPRLLIYDASKRATGIPA |
| | | RFSGSGSGTDFTLTISSLEPEDFAVYYCQQRASMPITFGGGTKVEIK |
| Ab 61 | SEQ ID NO: 722 | EIVLTQSPATLSLSPGERATLSCRASQSVSSYLAWYQQKPGQAPRLLIYDSSNRATGIPA |
| | | RFSGSGSGTDFTLTISSLEPEDFAVYYCQQAFNRPPTFGGGTKVEIK |
| Ab 62 | SEQ ID NO: 724 | EIVLTQSPATLSLSPGERATLSCRASQSVSSYLAWYQQKPGQAPRLLIYDASKRATGIPA |
| | | RFSGSGSGTDFTLTISSLEPEDFAVYYCQQSSVHPYTFGGGTKVEIK |
| Ab 63 | SEQ ID NO: 726 | DIQMTQSPSSVSASVGDRVTITCRASQGIDSWLAWYQQKPGKAPKLLIYAASSLQSGVPS |
| | | RFSGSGSGTDFTLTISSLQPEDFATYYCQQAYSLPPTFGGGTKVEIK |
| Ab 64 | SEQ ID NO: 728 | EIVMTQSPATLSVSPGERATLSCRASQSVSSNLAWYQQKPGQAPRLLIYGASTRATGIPA |
| | | RFSGSGSGTEFTLTISSLQSEDFAVYYCQQDDDGYTFGGGTKVEIK |
| Ab 65 | SEQ ID NO: 730 | EIVLTQSPATLSLSPGERATLSCRASQSVSSYLAWYQQKPGQAPRLLIYDASNRATGIPA |
| | | RFSGSGSGTDFTLTISSLEPEDFAVYYCQQDYSWPYTFGGGTKVEIK |
| Ab 66 | SEQ ID NO: 732 | EIVLTQSPGTLSLSPGERATLSCRASQSVSSYLAWYQQKPGQAPRLLIYDASNRATGIPA |
| | | RFSGSGSGTDFTLTISSLEPEDFAVYYCQQRSAYPITFGGGTKVEIK |
| Ab 67 | SEQ ID NO: 733 | EIVLTQSPATLSLSPGERATLSCRASQSVSSYLAWYQQKPGQAPRLLIYDASNRATGIPA |
| | | RFSGSGSGTDFTLTISSLEPEDFAVYYCQQRSHFPITFGGGTKVEIK |
| Ab 68 | SEQ ID NO: 735 | EIVLTQSPATLSLSPGERATLSCRASQSVSSYLAWYQQKPGQAPRLLIYDASNRATGIPA |
| | | RFSGSGSGTDFTLTISSLEPEDFAVYYCQQRANYPITFGGGTKVEIK |
| Ab 69 | SEQ ID NO: 737 | EIVLTQSPATLSLSPGERATLSCRASQSVSSYLAWYQQKPGQAPRLLIYDASNRATGIPA |
| | | RFSGSGSGTDFTLTISSLEPEDFAVYYCQQRADYPITFGGGTKVEIK |
| Ab 70 | SEQ ID NO: 738 | EIVLTQSPATLSLSPGERATLSCRASQSVSSYLAWYQQKPGQAPRLLIYDASNRATGIPA |
| | | RFSGSGSGTDFTLTISSLEPEDFAVYYCQQRSVYPITFGGGTKVEIK |
| Ab 71 | SEQ ID NO: 740 | EIVMTQSPGTLSLSPGERATLSCRASQSVSSSYLAWYQQKPGQAPRLLIYGASNRATGIP |
| | | DRFSGSGSGTDFTLTISRLEPEDFAVYYCQQAGSHPFTFGGGTKVEIK |
| Ab 72 | SEQ ID NO: 742 | DIQMTQSPSSLSASVGDRVTITCQASQDITNYLNWYQQKPGKAPKLLIYDASNLETGVPS |
| | | RFSGSRSGTDFTFTISSLQPEDIATYYCQQDVNYPPTFGGGTKVEIK |
| Ab 73 | SEQ ID NO: 744 | EIVMTQSPATLSVSPGERATLSCRASQSVSSNLAWYQQKPGQAPRLLIYGASTRATGIPA |
| | | RFSGSGSGTEFTLTISSLQSEDFAVYYCQQDDNYPYTFGGGTKVEIK |
| Ab 74 | SEQ ID NO: 745 | EIVLTQSPATLSLSPGERATLSCRASQSVSSYLAWYQQKPGQAPRLLIYDASNRATGIPA |
| | | RFSGSGSGTDFTLTISSLEPEDFAVYYCQQRSTFPITFGGGTKVEIK |
| Ab 75 | SEQ ID NO: 747 | EIVLTQSPATLSLSPGERATLSCRASQSVSSYLAWYQQKPGQAPRLLIYDASNRATGIPA |
| | | RFSGSGSGTDFTLTISSLEPEDFAVYYCQQVSNYPFTFGGGTKVEIK |
| Ab 76 | SEQ ID NO: 749 | DIVMTQSPDSLAVSLGERATINCKSSQSVLYSSNNKNYLAWYQQKPGQPPKLLIYWASTR |
| | | ESGVPDRFSGSGSGTDFTLTISSLQAEDVAVYYCQQYHDAPITFGGGTKVEIK |
| Ab 77 | SEQ ID NO: 751 | DIVMTQSPDSLAVSLGERATINCKSSQSVLYSSNNKNYLAWYQQKPGQPPKLLIYWASTR |
| | | ESGVPDRFSGSGSGTDFTLTISSLQAEDVAVYYCQQAYVVPPTFGGGTKVEIK |
| Ab 78 | SEQ ID NO: 753 | EIVLTQSPATLSLSPGERATLSCRASQSVSSYLAWYQQKPGQAPRLLIYDASNRATGIPA |
| | | RFSGSGSGTDFTLTISSLEPEDFAVYYCQQADNWPFTFGGGTKVEIK |
| Ab 79 | SEQ ID NO: 755 | DIVMTQSPLSLPVTPGEPASISCRSSQSLLHSNGYNYLDWYLQKPGQSPQLLIYLGSHRA |
| | | SGVPDRFSGSGSGTDFTLKISRVEAEDVGVYYCMQALESPRTFGGGTKVEIK |
| Ab 80 | SEQ ID NO: 757 | EIVLTQSPATLSLSPGERATLSCRASQSVSSYLAWYQQKPGQAPRLLIYDASNRATGIPA |
| | | RFSGSGSGTDFTLTISSLEPEDFAVYYCQQYVNWPFTFGGGTKVEIK |
| Ab 81 | SEQ ID NO: 759 | EIVLTQSPATLSLSPGERATLSCRASQSVSSYLAWYQQKPGQAPRLLIYDASNRATGIPA |
| | | RFSGSGSGTDFTLTISSLEPEDFAVYYCQQSSNWPWTFGGGTKVEIK |
| Ab 82 | SEQ ID NO: 761 | DIQMTQSPSSVSASVGDRVTITCRASQGISSWLAWYQQKPGKAPKLLIYAASSLQSGVPS |
| | | RFSGSGSGTDFTLTISSLQPEDFATYYCQQASTFPITFGGGTKVEIK |
| Ab 83 | SEQ ID NO: 763 | DIQMTQSPSSVSASVGDRVTITCRASQGISSWLAWYQQKPGKAPKLLIYAASSLQSGVPS |
| | | RFSGSGSGTDFTLTISSLQPEDFATYYCQQRNSLPLTFGGGTKVEIK |
| Ab 84 | SEQ ID NO: 764 | DIQMTQSPSSLSASVGDRVTITCRASQSISSYLNWYQQKPGKAPKLLIYAASSLQSGVPS |
| | | RFSGSGSGTDFTLTISSLQPEDFATYYCQQSYDFPITFGGGTKVEIK |
| Ab 85 | SEQ ID NO: 766 | DIQLTQSPSSVSASVGDRVTITCRASQDISSWLAWYQQKPGKAPKLLIYAASSLQSGVPS |
| | | RFSGSGSGTDFTLTISSLQPEDFATYYCQQEVDYPPLTFGGGTKVEIK |
| Ab 86 | SEQ ID NO: 768 | DIQMTQSPSTLSASVGDRVTITCRASQSISSWLAWYQQKPGKAPKLLIYKASSLESGVPS |
| | | RFSGSGSGTEFTLTISSLQPDDFATYYCQQLNSYSPTFGGGTKVEIK |
| Ab 87 | SEQ ID NO: 770 | EIVLTQSPATLSLSPGERATLSCRASQSVSRYLAWYQQKPGQAPRLLIYDASNRATGIPA |
| | | RFSGSGSGTDFTLTISSLEPEDFAVYYCQQYIFWPPTFGGGTKVEIK |

[0333] In some embodiments, anti-TREM2 antibodies of the present disclosure comprise (a) a heavy chain variable region comprising at least one, two, or three HVRs selected from HVR-H1, HVR-H2, and HVR-H3 of any one of the antibodies listed in Table 6C or selected from Ab1, Ab2, Ab3, Ab4, Ab5, Ab6, Ab7, Ab8, Ab9, Ab10, Abl11, Ab12, Ab13, Ab14, Ab15, Ab16, Ab17, Ab18, Ab19, Ab20, Ab21, Ab22, Ab23, Ab24, Ab25, Ab26, Ab27, Ab28, Ab29, Ab30, Ab31, Ab32, Ab33, Ab34, Ab35, Ab36, Ab37, Ab38, Ab39, Ab40, Ab41, Ab42, Ab43, Ab44, Ab45, Ab46, Ab47, Ab48, Ab49, Ab50, Ab51, Ab52, Ab53, Ab54, Ab55, Ab56, Ab57, Ab58, Ab59, Ab60, Ab61, Ab62, Ab63, Ab64, Ab65, Ab66, Ab67, Ab68, Ab69, Ab70, Ab71, Ab72, Ab73, Ab74, Ab75, Ab76, Ab77, Ab78, Ab79, Ab80, Ab81, Ab82, Ab83, Ab84, Ab85, Ab86, and Ab87; and/or (b) a light chain variable region comprising at least one, two, or three HVRs selected from HVR-L1, HVR-L2, and HVR-L3 of any one of the antibodies selected from Ab1, Ab2, Ab3, Ab4, Ab5, Ab6, Ab7, Ab8, Ab9, Ab10, Ab11, Ab12, Ab13, Ab14, Ab15, Ab16, Ab17, Ab18, Ab19, Ab20, Ab21, Ab22, Ab23, Ab24, Ab25, Ab26, Ab27, Ab28, Ab29, Ab30, Ab31, Ab32, Ab33, Ab34, Ab35, Ab36, Ab37, Ab38, Ab39, Ab40, Ab41, Ab42, Ab43, Ab44, Ab45, Ab46, Ab47, Ab48, Ab49, Ab50, Ab51, Ab52, Ab53, Ab54, Ab55, Ab56, Ab57, Ab58, Ab59, Ab60, Ab61, Ab62, Ab63, Ab64, Ab65, Ab66, Ab67, Ab68, Ab69, Ab70, Ab71, Ab72, Ab73, Ab74, Ab75, Ab76, Ab77, Ab78, Ab79, Ab80, Ab81, Ab82, Ab83, Ab84, Ab85, Ab86, and Ab87.

[0334] In some embodiments, the anti-TREM2 antibody comprises a light chain variable domain and a heavy chain variable region, wherein the light chain variable region comprises a HVR-L1, HVR-L2, and HVR-L3, and the heavy chain variable domain comprises a HVR-H1, HVR-H2, and HVR-H3 of an antibody listed in Table 6C or selected from the group consisting of: Ab1, Ab2, Ab3, Ab4, Ab5, Ab6, Ab7, Ab8, Ab9, Ab10, Abl11, Ab12, Ab13, Ab14, Ab15, Ab16, Ab17, Ab18, Ab19, Ab20, Ab21, Ab22, Ab23, Ab24, Ab25, Ab26, Ab27, Ab28, Ab29, Ab30, Ab31, Ab32, Ab33, Ab34, Ab35, Ab36, Ab37, Ab38, Ab39, Ab40, Ab41, Ab42, Ab43, Ab44, Ab45, Ab46, Ab47, Ab48, Ab49, Ab50, Ab51, Ab52, Ab53, Ab54, Ab55, Ab56, Ab57, Ab58, Ab59, Ab60, Ab61, Ab62, Ab63, Ab64, Ab65, Ab66, Ab67, Ab68, Ab69, Ab70, Ab71, Ab72, Ab73, Ab74, Ab75, Ab76, Ab77, Ab78, Ab79, Ab80, Ab81, Ab82, Ab83, Ab84, Ab85, Ab86, and Ab87.

[0335] In some embodiments, an anti-human TREM2 antibody is an antibody which competes with a monoclonal antibody selected from the group consisting of: Ab1, Ab2, Ab3, Ab4, Ab5, Ab6, Ab7, Ab8, Ab9, Ab10, A11, Ab12, Ab13, Ab14, Ab15, Ab16, Ab17, Ab18, Ab19, Ab20, Ab21, Ab22, Ab23, Ab24, Ab25, Ab26, Ab27, Ab28, Ab29, Ab30, Ab31, Ab32, Ab33, Ab34, Ab35, Ab36, Ab37, Ab38, Ab39, Ab40, Ab41, Ab42, Ab43, Ab44, Ab45, Ab46, Ab47, Ab48, Ab49, Ab50, Ab51, Ab52, Ab53, Ab54, Ab55, Ab56, Ab57, Ab58, Ab59, Ab60, Ab61, Ab62, Ab63, Ab64, Ab65, Ab66, Ab67, Ab68, Ab69, Ab70, Ab71, Ab72, Ab73, Ab74, Ab75, Ab76, Ab77, Ab78, Ab79, Ab80, Ab81, Ab82, Ab83, Ab84, Ab85, Ab86, and Ab87 for binding to TREM2.

[0336] In some embodiments, each of the light chain variable regions disclosed in Tables 6A-6C and each of the heavy chain variable regions disclosed in Tables 6A-6C may be attached to the light chain constant regions (Table 4) and heavy chain constant regions (Table 5) to form complete antibody light and heavy chains, respectively, as further discussed below. Further, each of the generated heavy and light chain sequences may be combined to form a complete antibody structure. It should be understood that the heavy chain and light chain variable regions provided herein can also be attached to other constant domains having different sequences than the exemplary sequences listed herein.

D. PCT Patent Application Publication No. WO2017/062672A1

[0337] In some embodiments, the TREM2 agonist is an antibody or an antigen-binding fragment thereof, as described in PCT Patent Application Publication No. WO2017/062672A1 (“the '672 application”), which is incorporated by reference herein, in its entirety.

[0338] In some embodiments, the TREM2 binding agent comprises an antibody that comprises a light chain variable domain comprising a CDRL1, CDRL2, and CDRL3 (also referred to as HVR-L1, HVR-L2, and HVR-L3, respectively), and a heavy chain variable domain comprising a CDRH1, CDRH2, and CDRH3 (also referred to as HVR-H1, HVR-H2, and HVR-H3, respectively) disclosed in the '672 application specification. In some embodiments, the TREM2 binding agent comprises an antibody that comprises a light chain variable domain and a heavy chain variable domain disclosed in the '672 application specification.

[0339] In some embodiments, the antibody comprises a light chain variable domain and a heavy chain variable domain, wherein the light chain variable domain, or the heavy chain variable domain, or both comprise at least one, two, three, four, five, or six HVRs selected from HVR-L1, HVR-L2, HVR-L3, HVR-H1, HVR-H2, and HVR-H3 such that: (a) the HVR-L1 comprises an amino acid sequence selected from the group consisting of SEQ ID NOs: 829-843, 1401, 1510-1514, 1554-1558, and 1646-1648; (b) the HVR-L2 comprises an amino acid sequence selected from the group consisting of SEQ ID NOs: 844-853, 1515-1517, and 1559-1563; (c) the HVR-L3 comprises an amino acid sequence selected from the group consisting of SEQ ID NOs: 854-867, 1402, 1403, 1518-1522, and 1564-1566; (d) the HVR-H1 comprises an amino acid sequence selected from the group consisting of SEQ ID NOs: 868-885, 1404, 1523-1525, 1567-1574, and 1649-1655; (e) the HVR-H2 comprises an amino acid sequence selected from the group consisting of SEQ ID NOs: 886-904, 1405-1407, 1526-1528, 1575-1582, 1656-1662, and 1708; or (f) the HVR-H3 comprises an amino acid sequence selected from the group consisting of SEQ ID NOs: 905-992, 1408, 1409, 1529, 1530, and 1583-1590. In some embodiments: (a) the HVR-L1 comprises the amino acid sequence of SEQ ID NO: 831, the HVR-L2 comprises the amino acid sequence of SEQ ID NO: 846, the HVR-L3 comprises the amino acid sequence of SEQ ID NO: 856, the HVR-H1 comprises the amino acid sequence of SEQ ID NO: 871, the HVR-H2 comprises the amino acid sequence of SEQ ID NO: 889, and the HVR-H3 comprises the amino acid sequence of SEQ ID NO: 908; (b) the HVR-L1 comprises the amino acid sequence of SEQ ID NO: 834, the HVR-L2 comprises the amino acid sequence of SEQ ID NO: 848, the HVR-L3 comprises the amino acid sequence of SEQ ID NO: 859, the HVR-H1 comprises the amino acid sequence of SEQ ID NO: 873, the HVR-H2 comprises the amino acid sequence of SEQ ID NO: 891, and the HVR-H3 comprises the amino acid sequence of SEQ ID NO: 910; (c) the HVR-L1 comprises the amino acid sequence of SEQ ID NO: 831, the HVR-L2 comprises the amino acid sequence of SEQ ID NO: 846, the HVR-L3 comprises the amino acid sequence of SEQ ID NO: 856, the HVR-H1 comprises the amino acid sequence of SEQ ID NO: 871, the HVR-H2 comprises the amino acid sequence of SEQ ID NO: 889, and the HVR-H3 comprises the amino acid sequence of SEQ ID NO: 908; (d) the HVR-L1 comprises the amino acid sequence of SEQ ID NO: 836, the HVR-L2 comprises the amino acid sequence of SEQ ID NO: 849, the HVR-L3 comprises the amino acid sequence of SEQ ID NO: 855, the HVR-H1 comprises the amino acid sequence of SEQ ID NO: 875, the HVR-H2 comprises the amino acid sequence of SEQ ID NO: 893, and the HVR-H3 comprises the amino acid sequence of SEQ ID NO: 912; (e) the HVR-H1 comprises the amino acid sequence of SEQ ID NO: 978, the HVR-H2 comprises the amino acid sequence of SEQ ID NO: 896, and the HVR-H3 comprises the amino acid sequence of SEQ ID NO: 915; (f) the HVR-L1 comprises the amino acid sequence of SEQ ID NO: 839, the HVR-L2 comprises the amino acid sequence of SEQ ID NO: 848, the HVR-L3 comprises the amino acid sequence of SEQ ID NO: 863, the HVR-H1 comprises the amino acid sequence of SEQ ID NO: 880, the HVR-H2 comprises the amino acid sequence of SEQ ID NO: 898, and the HVR-H3 comprises the amino acid sequence of SEQ ID NO: 917; (g) the HVR-L1 comprises the amino acid sequence of SEQ ID NO: 840, the HVR-L2 comprises the amino acid sequence of SEQ ID NO: 848, the HVR-L3 comprises the amino acid sequence of SEQ ID NO: 868, the HVR-H1 comprises the amino acid sequence of SEQ ID NO: 881, the HVR-H2 comprises the amino acid sequence of SEQ ID NO: 899, and the HVR-H3 comprises the amino acid sequence of SEQ ID NO: 918; (h) the HVR-L1 comprises the amino acid sequence of SEQ ID NO: 841, the HVR-L2 comprises the amino acid sequence of SEQ ID NO: 852, the HVR-L3 comprises the amino acid sequence of SEQ ID NO: 865, the HVR-H1 comprises the amino acid sequence of SEQ ID NO: 882, the HVR-H2 comprises the amino acid sequence of SEQ ID NO: 900, and the HVR-H3 comprises the amino acid sequence of SEQ ID NO: 919; (i) the HVR-L1 comprises the amino acid sequence of SEQ ID NO: 842, the HVR-L2 comprises the amino acid sequence of SEQ ID NO: 849, the HVR-L3 comprises the amino acid sequence of SEQ ID NO: 866, the HVR-H1 comprises the amino acid sequence of SEQ ID NO: 883, the HVR-H2 comprises the amino acid sequence of SEQ ID NO: 902, and the HVR-H3 comprises the amino acid sequence of SEQ ID NO: 920; or (j) the HVR-L1 comprises the amino acid sequence of SEQ ID NO: 936, the HVR-L2 comprises the amino acid sequence of SEQ ID NO: 849, the HVR-L3 comprises the amino acid sequence of SEQ ID NO: 855, the HVR-H1 comprises the amino acid sequence of SEQ ID NO: 885, the HVR-H2 comprises the amino acid sequence of SEQ ID NO: 904, and the HVR-H3 comprises the amino acid sequence of SEQ ID NO: 922. In some embodiments, the antibody comprises a light chain variable domain and a heavy chain variable domain, wherein the light chain variable domain comprises: (a) an HVR-L1 comprising an amino acid sequence selected from the group consisting of SEQ ID NOs: 829-843, 1401, 1510-1514, 1554-1558, and 1646-1648, or an amino acid sequence with at least about 90% homology to an amino acid sequence selected from the group consisting of SEQ ID NOs: 829-843, 1401, 1510-1514, 1554-1558, and 1646-1648; (b) an HVR-L2 comprising an amino acid sequence selected from the group consisting of SEQ ID NOs: 844-853, 1515-1517, and 1559-1563, or an amino acid sequence with at least about 90% homology to an amino acid sequence selected from the group consisting of SEQ ID NOs: 844-853, 1515-1517, and 1559-1563; and (c) an HVR-L3 comprising an amino acid sequence selected from the group consisting of SEQ ID NOs: 854-867, 1402, 1403, 1518-1522, and 1564-1566, or an amino acid sequence with at least about 90% homology to an amino acid sequence selected from the group consisting of SEQ ID NOs: 854-867, 1402, 1403, 1518-1522, and 1564-1566; and wherein the heavy chain variable domain comprises: (a) an HVR-H1 comprising an amino acid sequence selected from the group consisting of SEQ ID NOs: 868-885, 1404, 1523-1525, 1567-1574, and 1649-1655, or an amino acid sequence with at least about 90% homology to an amino acid sequence selected from the group consisting of SEQ ID NOs: 868-885, 1404, 1523-1525, 1567-1574, and 1649-1655; (b) an HVR-H2 comprising an amino acid sequence selected from the group consisting of SEQ ID NOs: 886-904, 1405-1407, 1526-1528, 1575-1582, 1656-1662, and 1708, or an amino acid sequence with at least about 90% homology to an amino acid sequence selected from the group consisting of SEQ ID NOs: 886-904, 1405-1407, 1526-1528, 1575-1582, 1656-1662, and 1708; and (c) an HVR-H3 comprising an amino acid sequence selected from the group consisting of SEQ ID NOs: 905-992, 1408, 1409, 1529, 1530, and 1583-1590, or an amino acid sequence with at least about 90% homology to an amino acid sequence selected from the group consisting of SEQ ID NOs: 905-992, 1408, 1409, 1529, 1530, and 1583-1590. In some embodiments, the antibody comprises a light chain variable domain comprising an amino acid sequence selected from the group consisting of SEQ ID NOs: 1039-1218, 1422-1454, 1499-1509, 1544-1550, 1629-1636, 1641, 1643, 1664, 1669, and 1670; and/or a heavy chain variable domain comprising an amino acid sequence selected from the group consisting of SEQ ID NOs: 1219-1400, 1455-1498, 1551-1553, and 1637-1640, 1642-1645, and 1665-1667.

[0340] In some embodiments, the antibody comprises a light chain variable domain and a heavy chain variable domain, wherein: (a) the light chain variable domain comprises the amino acid sequence of SEQ ID NO: 1153 and the heavy chain variable domain comprises the amino acid sequence of SEQ ID NO:1341; (b) the light chain variable domain comprises the amino acid sequence of SEQ ID NO: 1670 and the heavy chain variable domain comprises the amino acid sequence of SEQ ID NO:1341; (c) the light chain variable domain comprises the amino acid sequence of SEQ ID NO: 1154 and the heavy chain variable domain comprises the amino acid sequence of SEQ ID NO:1342; (d) the light chain variable domain comprises the amino acid sequence of SEQ ID NO: 1155 and the heavy chain variable domain comprises the amino acid sequence of SEQ ID NO:1343; (e) the light chain variable domain comprises the amino acid sequence of SEQ ID NO: 1156 and the heavy chain variable domain comprises the amino acid sequence of SEQ ID NO:1344; (f) the light chain variable domain comprises the amino acid sequence of SEQ ID NO: 1157 and the heavy chain variable domain comprises the amino acid sequence of SEQ ID NO:1345; (g) the light chain variable domain comprises the amino acid sequence of SEQ ID NO: 1158 and the heavy chain variable domain comprises the amino acid sequence of SEQ ID NO:1346; (h) the light chain variable domain comprises the amino acid sequence of SEQ ID NO: 1159 and the heavy chain variable domain comprises the amino acid sequence of SEQ ID NO:1346; (i) the light chain variable domain comprises the amino acid sequence of SEQ ID NO: 1160 and the heavy chain variable domain comprises the amino acid sequence of SEQ ID NO:1347; (j) the light chain variable domain comprises the amino acid sequence of SEQ ID NO: 1161 and the heavy chain variable domain comprises the amino acid sequence of SEQ ID NO:1348; (k) the light chain variable domain comprises the amino acid sequence of SEQ ID NO: 1162 and the heavy chain variable domain comprises the amino acid sequence of SEQ ID NO:1349; (1) the light chain variable domain comprises the amino acid sequence of SEQ ID NO: 1163 and the heavy chain variable domain comprises the amino acid sequence of SEQ ID NO: 1350; (m) the light chain variable domain comprises the amino acid sequence of SEQ ID NO: 1663 and the heavy chain variable domain comprises the amino acid sequence of SEQ ID NO: 1665; (n) the light chain variable domain comprises the amino acid sequence of SEQ ID NO: 1664 and the heavy chain variable domain comprises the amino acid sequence of SEQ ID NO: 1666; (o) the light chain variable domain comprises the amino acid sequence of SEQ ID NO: 1664 and the heavy chain variable domain comprises the amino acid sequence of SEQ ID NO:1667; (p) the light chain variable domain comprises the amino acid sequence of SEQ ID NO: 1039 and the heavy chain variable domain comprises the amino acid sequence of SEQ ID NO: 1219; (q) the light chain variable domain comprises the amino acid sequence of SEQ ID NO: 1050 and the heavy chain variable domain comprises the amino acid sequence of SEQ ID NO:1229; (r) the light chain variable domain comprises the amino acid sequence of SEQ ID NO: 1072 and the heavy chain variable domain comprises the amino acid sequence of SEQ ID NO:1239; (s) the light chain variable domain comprises the amino acid sequence of SEQ ID NO: 1061 and the heavy chain variable domain comprises the amino acid sequence of SEQ ID NO: 1249; (t) the light chain variable domain comprises the amino acid sequence of SEQ ID NO: 1669 and the heavy chain variable domain comprises the amino acid sequence of SEQ ID NO: 1249; (u) the light chain variable domain comprises the amino acid sequence of SEQ ID NO: 1083 and the heavy chain variable domain comprises the amino acid sequence of SEQ ID NO:1259; (v) the light chain variable domain comprises the amino acid sequence of SEQ ID NO: 1094 and the heavy chain variable domain comprises the amino acid sequence of SEQ ID NO:1269; (w) the light chain variable domain comprises the amino acid sequence of SEQ ID NO:1105 and the heavy chain variable domain comprises the amino acid sequence of SEQ ID NO:1279; (x) the light chain variable domain comprises the amino acid sequence of SEQ ID NO:1106 and the heavy chain variable domain comprises the amino acid sequence of SEQ ID NO:1280; (y) the light chain variable domain comprises the amino acid sequence of SEQ ID NO: 1107 and the heavy chain variable domain comprises the amino acid sequence of SEQ ID NO: 1281; (z) the light chain variable domain comprises the amino acid sequence of SEQ ID NO: 1118 and the heavy chain variable domain comprises the amino acid sequence of SEQ ID NO: 1249; (aa) the light chain variable domain comprises the amino acid sequence of SEQ ID NO: 1119 and the heavy chain variable domain comprises the amino acid sequence of SEQ ID NO: 1291; (bb) the light chain variable domain comprises the amino acid sequence of SEQ ID NO: 1130 and the heavy chain variable domain comprises the amino acid sequence of SEQ ID NO: 1281; (cc) the light chain variable domain comprises the amino acid sequence of SEQ ID NO: 1499 and the heavy chain variable domain comprises the amino acid sequence of SEQ ID NO:1301; (dd) the light chain variable domain comprises the amino acid sequence of SEQ ID NO: 1131 and the heavy chain variable domain comprises the amino acid sequence of SEQ ID NO: 1311; (ee) the light chain variable domain comprises the amino acid sequence of SEQ ID NO: 1142 and the heavy chain variable domain comprises the amino acid sequence of SEQ ID NO:1331; (ff) the light chain variable domain comprises the amino acid sequence of SEQ ID NO: 1164 and the heavy chain variable domain comprises the amino acid sequence of SEQ ID NO:1351; (gg) the light chain variable domain comprises the amino acid sequence of SEQ ID NO: 1175 and the heavy chain variable domain comprises the amino acid sequence of SEQ ID NO: 1455; (hh) the light chain variable domain comprises the amino acid sequence of SEQ ID NO: 1185 and the heavy chain variable domain comprises the amino acid sequence of SEQ ID NO:1361; (ii) the light chain variable domain comprises the amino acid sequence of SEQ ID NO: 1216 and the heavy chain variable domain comprises the amino acid sequence of SEQ ID NO: 1371; (jj) the light chain variable domain comprises the amino acid sequence of SEQ ID NO: 1217 and the heavy chain variable domain comprises the amino acid sequence of SEQ ID NO:1381; (kk) the light chain variable domain comprises the amino acid sequence of SEQ ID NO: 1218 and the heavy chain variable domain comprises the amino acid sequence of SEQ ID NO:1391; (ll) the light chain variable domain comprises the amino acid sequence of SEQ ID NO: 1544 and the heavy chain variable domain comprises the amino acid sequence of SEQ ID NO:1551; (mm) the light chain variable domain comprises the amino acid sequence of SEQ ID NO: 1629 and the heavy chain variable domain comprises the amino acid sequence of SEQ ID NO:1551; (nn) the light chain variable domain comprises the amino acid sequence of SEQ ID NO: 1545 and the heavy chain variable domain comprises the amino acid sequence of SEQ ID NO:1552; (oo) the light chain variable domain comprises the amino acid sequence of SEQ ID NO: 1546 and the heavy chain variable domain comprises the amino acid sequence of SEQ ID NO: 1551; (pp) the light chain variable domain comprises the amino acid sequence of SEQ ID NO: 1546 and the heavy chain variable domain comprises the amino acid sequence of SEQ ID NO: 1637; (qq) the light chain variable domain comprises the amino acid sequence of SEQ ID NO: 1547 and the heavy chain variable domain comprises the amino acid sequence of SEQ ID NO:1551; (rr) the light chain variable domain comprises the amino acid sequence of SEQ ID NO: 1548 and the heavy chain variable domain comprises the amino acid sequence of SEQ ID NO:1553; (ss) the light chain variable domain comprises the amino acid sequence of SEQ ID NO:1630 and the heavy chain variable domain comprises the amino acid sequence of SEQ ID NO:1638; (tt) the light chain variable domain comprises the amino acid sequence of SEQ ID NO: 1631 and the heavy chain variable domain comprises the amino acid sequence of SEQ ID NO:1553; (uu) the light chain variable domain comprises the amino acid sequence of SEQ ID NO:1549 and the heavy chain variable domain comprises the amino acid sequence of SEQ ID NO:1551; (vv) the light chain variable domain comprises the amino acid sequence of SEQ ID NO:1632 and the heavy chain variable domain comprises the amino acid sequence of SEQ ID NO: 1639; (ww) the light chain variable domain comprises the amino acid sequence of SEQ ID NO:1549 and the heavy chain variable domain comprises the amino acid sequence of SEQ ID NO: 1640; (xx) the light chain variable domain comprises the amino acid sequence of SEQ ID NO: 1550 and the heavy chain variable domain comprises the amino acid sequence of SEQ ID NO:1551; (yy) the light chain variable domain comprises the amino acid sequence of SEQ ID NO:1633 and the heavy chain variable domain comprises the amino acid sequence of SEQ ID NO:1551; (zz) the light chain variable domain comprises the amino acid sequence of SEQ ID NO: 1634 and the heavy chain variable domain comprises the amino acid sequence of SEQ ID NO: 1642; (aaa) the light chain variable domain comprises the amino acid sequence of SEQ ID NO:1635 and the heavy chain variable domain comprises the amino acid sequence of SEQ ID NO: 1644; or (bbb) the light chain variable domain comprises the amino acid sequence of SEQ ID NO:1636 and the heavy chain variable domain comprises the amino acid sequence of SEQ ID NO:1645. In any of the above embodiments, the light chain variable domain and/or heavy chain variable domain comprises an amino acid sequence with at least about 90% homology to the amino acid sequence indicated.

[0341] In some embodiments, the antibody is an antibody disclosed in Tables 2A, 2B, 3A, 3B, 4A, 4B, 7A and 7B of PCT Patent Application Publication No. WO2017/062672A1, reproduced below as Tables 7A-7H.

TABLE 7A
EU or Kabat light chain HVR sequences

| Ab | HVRL1 | HVRL2 | HVRL3 |
|---|---|---|---|
| 4D11 | RASENIYSFLA | NSKTFAE | QHHYGTPPWT |
| | (SEQ ID NO: 829) | (SEQ ID NO: 844) | (SEQ ID NO: 854) |
| 78C5 | RASENIYSFLA | NSKTFAE | QHHYGTPPWT |
| | (SEQ ID NO: 829) | (SEQ ID NO: 844) | (SEQ ID NO: 854) |
| 6G12 | KSSQSLLYSSNQKNCLA | WAFTRES | QQYYSYPLT |
| | (SEQ ID NO: 830) | (SEQ ID NO: 845) | (SEQ ID NO: 855) |
| 8F11 | KSSQSLLYSSNQKNCLA | LVSKLDS | MQGTHFPLT |
| | (SEQ ID NO: 830) | (SEQ ID NO: 846) | (SEQ ID NO: 856) |
| 8E10 | KSSQSLLDSDGKTYLN | LVSKLDS | WQGTHFPYT |
| | (SEQ ID NO: 832) | (SEQ ID NO: 846) | (SEQ ID NO: 857) |
| 7E5 | KSSQSLLYSNGKTFLS | LVSKLDS | MQGTHFPLT |
| | (SEQ ID NO: 831) | (SEQ ID NO: 846) | (SEQ ID NO: 856) |
| 7F8 | SASSSVSYMY | LTSILAS | QQWSFNPYT |
| | (SEQ ID NO: 833) | (SEQ ID NO: 847) | (SEQ ID NO: 858) |
| 8F8 | RSSQSLVHSNGNTYLH | KVSNRFS | SQSTHVPLT |
| | (SEQ ID NO: 834) | (SEQ ID NO: 848) | (SEQ ID NO: 859) |
| H7 | SASSSVSYMY | LTSILAS | QQWSFNPYT |
| | (SEQ ID NO: 833) | (SEQ ID NO: 847) | (SEQ ID NO: 858) |
| 2H8 | SASSSVSYMY | LTSILAS | QQWSFNPYT |
| | (SEQ ID NO: 833) | (SEQ ID NO: 847) | (SEQ ID NO: 858) |
| 3A2 | RSSQTIIHSNGNTYLE | KVSNRFS | FQGSHVPYT |
| | (SEQ ID NO: 835) | (SEQ ID NO: 848) | (SEQ ID NO: 860) |
| 3A7 | KSSQSLLYSNGKTFLS | LVSKLDS | MQGTHFPLT |
| | (SEQ ID NO: 831) | (SEQ ID NO: 846) | (SEQ ID NO: 856) |
| 3B10 | KSSQSLLYSSDQKNYLA | WASTRES | QQYYSYPLT |
| | (SEQ ID NO: 836) | (SEQ ID NO: 849) | (SEQ ID NO: 855) |
| 4F11 | RSSQTIIHSNGNTYLE | KVSNRFS | FQGSHVPYT |
| | (SEQ ID NO: 835) | (SEQ ID NO: 848) | (SEQ ID NO: 860) |
| 6H6 | KSSQSVFYSSNQKNYLA | WASTRES | HQYLSSLT |
| | (SEQ ID NO: 1401) | (SEQ ID NO: 849) | (SEQ ID NO: 1402) |
| 7A9 | RASENIYSYLA | KAKTLAE | QHHYGTPFT |
| | (SEQ ID NO: 837) | (SEQ ID NO: 850) | (SEQ ID NO: 861) |
| 8A1 | RTSENVYSNLA | AATNLAD | HHFWGTPYT |
| | (SEQ ID NO: 838) | (SEQ ID NO: 851) | (SEQ ID NO: 862) |
| 9F5 | RSSQSLVHSNGYTYLH | KVSNRFS | SQSTRVPYT |
| | (SEQ ID NO: 839) | (SEQ ID NO: 848) | (SEQ ID NO: 863) |
| 9G1 | RFSQSLVHSNGNTYLH | KVSNRFS | SQSTRVPPT |
| | (SEQ ID NO: 840) | (SEQ ID NO: 848) | (SEQ ID NO: 864) |
| 9G3 | KASSNVNYMS | FTSNLPS | SGEVTQFT |
| | (SEQ ID NO: 841) | (SEQ ID NO: 852) | (SEQ ID NO: 865) |
| 10A9 | RSSQTIIHSNGNTYLE | KVSNRFC | FQGSHVPYT |
| | (SEQ ID NO: 835) | (SEQ ID NO: 853) | (SEQ ID NO: 860) |
| 11A8 | KSSQSLLNSGNQKKYLT | WASTRES | QNDYGFPLT |
| | (SEQ ID NO: 842) | (SEQ ID NO: 849) | (SEQ ID NO: 866) |
| 12D9 | KSSQSLLYSGNQKNFLA | WASTRES | QQYYSYPFT |
| | (SEQ ID NO: 843) | (SEQ ID NO: 849) | (SEQ ID NO: 867) |
| 12F9 | KSSQSLLYSSDQKNYLA | WASTRES | QQYYSYPLT |
| | (SEQ ID NO: 836) | (SEQ ID NO: 849) | (SEQ ID NO: 855) |
| 10C1 | KSSQSVFYSSNQKNYLA | WASTRES | HQYLSSLT |
| | (SEQ ID NO: 1401 | (SEQ ID NO: 849) | (SEQ ID NO: 1402) |
| 7E9 | KSSQSLLYSSNQKNCLA | WASTRES | QQYYSYPLT |
| | (SEQ ID NO: 830) | (SEQ ID NO: 849) | (SEQ ID NO: 855) |
| 8C3 | RSSQSLVHSNGNTYLH | KVSNRFS | SQSTHVPPT |
| | (SEQ ID NO: 834) | (SEQ ID NO: 848) | (SEQ ID NO: 1403) |
| IB4v1 | SQDVSTTVA | SASYRYT | QQHYSTPPT |
| | (SEQ ID NO: 1510) | (SEQ ID NO: 1515) | (SEQ ID NO: 1518) |
| IB4v2 | SQSLVHSNGNTYLH | KVSNRVS | SQSTHVPLT |
| | (SEQ ID NO: 1554) | (SEQ ID NO: 1559) | (SEQ ID NO: 859) |
| 6H2 | SQSIVHSNGNTYLE | KVSNRFS | FQGSHVPFT |
| | (SEQ ID NO: 1511) | (SEQ ID NO: 848) | (SEQ ID NO: 1519) |
| 7B11 | SQGVSTAVA | WASTRHT | HQHYSTYT |
| | (SEQ ID NO: 1512) | (SEQ ID NO: 1516) | (SEQ ID NO: 1520) |
| 18D8 | SQDVRTAVA | SASYRYT | QQHYGTPPWT |
| | (SEQ ID NO: 1513) | (SEQ ID NO: 1515) | (SEQ ID NO: 1521) |
| 18E4v1 | SENVVTYVS | GASNRYT | GQGYSYPYT |
| | (SEQ ID NO: 1514) | (SEQ ID NO: 1517) | (SEQ ID NO: 1522) |
| 18E4v2 | SQSLVHSNGNTYLH | KVSDRFS | SQSTHVPLT |
| | (SEQ ID NO: 1554) | (SEQ ID NO: 1560) | (SEQ ID NO: 859) |
| 29F6v1 | SQDVRTAVA | SASYRYT | QQHYGTPPWT |
| | (SEQ ID NO: 1513) | (SEQ ID NO: 1515) | (SEQ ID NO: 1521) |
| 29F6v2 | SQSLVHSNGDTYLH | KVSNRFS | SQSTHVPLT |
| | (SEQ ID NO: 1555) | (SEQ ID NO: 848) | (SEQ ID NO: 859) |
| 40D5 | SQDVRTAVA | SASYRYT | QQHYGTPPWT |
| | (SEQ ID NO: 1513) | (SEQ ID NO: 1515) | (SEQ ID NO: 1521) |
| 43B9 | SQDVRTAVA | SASYRYT | QQHYGTPPWT |
| | (SEQ ID NO: 1513) | (SEQ ID NO: 1515) | (SEQ ID NO: 1521) |
| 44A8v1 | SQDVSTTVA | SASYRYT | QQHYSTPPT |
| | (SEQ ID NO: 1510) | (SEQ ID NO: 1515) | (SEQ ID NO: 1518) |
| 44A8v2 | SESVDYHGTSLMQ | AASNVES | QQNRKILWT |
| | (SEQ ID NO: 1556) | (SEQ ID NO: 1561) | (SEQ ID NO: 1564) |
| 44B4v1 | SQDVRTAVA | SASYRYT | QQHYGTPPWT |
| | (SEQ ID NO: 1513) | (SEQ ID NO: 1515) | (SEQ ID NO: 1521) |
| 44B4v2 | SENIZYSLA | NANSLED | KQAYDVPWT |
| | (SEQ ID NO: 1557) | (SEQ ID NO: 1562) | (SEQ ID NO: 1565) |
| 29F7 | RASQSIGTSIH | FASESIS | QQTNTWPIT |
| | (SEQ ID NO: 1558) | (SEQ ID NO: 1563) | (SEQ ID NO: 1566) |
| 32G1 | RSSQSLVHSNGNTYLH | KVSNRFS | SQSTHVPLT |
| | (SEQ ID NO: 834) | (SEQ ID NO: 848) | (SEQ ID NO: 859) |

TABLE 7B
EU or Kabat light chain HVR consensus sequences

| | HVR 1,1 |
|---|---|
| Consensus 1 | RXSENXYSXLA (SEQ ID NO: 1646) |
| Consensus 2 | RSSQXXXHSNGXTYLX (SEQ ID NO: 1647) |
| Consensus 3 | KSSQSXXXSXXQKXXLX (SEQ ID NO: 1648) |

TABLE 7C
EU or Kabat heavy chain HVR sequences

| Ab ID | HVR H1 | HVR H2 | HVR H3 |
|---|---|---|---|
| 4D11 | FTLSSYAMS | VASISRGGSTYYP | TRGYGYYRTPFAN |
| | (SEQ ID NO: 868) | (SEQ ID NO: 886) | (SEQ ID NO: 905) |
| 78C5 | FTLSSYAMS | VASISRGGSTYYP | TRGYGYYRTPFAN |
| | (SEQ ID NO: 868) | (SEQ ID NO: 886) | (SEQ ID NO: 905) |
| 6G12 | YTFTEYTME | IGGINPNNGGTSYS | ARGGSHYYAMDY |
| | (SEQ ID NO: 869) | (SEQ ID NO: 887) | (SEQ ID NO: 906) |
| 8E10 | YTFTDYEME | IGVIDPETGGTAYN | TSPDYYGSSYPLYYAMDY |
| | (SEQ ID NO: 870) | (SEQ ID NO: 888) | (SEQ ID NO: 907) |
| 7E5 | FTFSDAWMG | VAEIRDKVKNHATYYA | RLGVFDY |
| | (SEQ ID NO: 871) | (SEQ ID NO: 889) | (SEQ ID NO: 908) |
| 7F8 | FSFNTYAMN | IARIRSKSNNYATYYA | VRHGDGNLWYIDV |
| | (SEQ ID NO: 872) | (SEQ ID NO: 890) | (SEQ ID NO: 909) |
| 8F8 | YTVSRYWMH | IGRIDPNSGGTKYN | VLTGTDFDY |
| | (SEQ ID NO: 873) | (SEQ ID NO: 891) | (SEQ ID NO: 90) |
| 1H7 | FSFNTYAMN | IARIRSKSNNYATYYA | VRHGDGNLWYIDV |
| | (SEQ ID NO: 872) | (SEQ ID NO: 890) | (SEQ ID NO: 909) |
| 2H8 | FSFNTYAMN | IARIRSKSNNYATYYA | VRHGDGNLWYIDV |
| | (SEQ ID NO: 872) | (SEQ ID NO: 890) | (SEQ ID NO: 909) |
| 3A2 | YPFSNFWIT | IGDIYPGSDNSNYN | AREAYYTNPGFAY |
| | (SEQ ID NO: 874) | (SEQ ID NO: 892) | (SEQ ID NO: 911) |
| 3A7 | FTFSDAWMG | VAEIRDKVKNHATYYA | RLGVFDY |
| | (SEQ ID NO: 871) | (SEQ ID NO: 889) | (SEQ ID NO: 908) |
| 3B10 | LTSNTYTQT | ESVIRSKSNNFSTLYA | VRHKSNRYPGVY |
| | (SEQ ID NO: 875) | (SEQ ID NO: 893) | (SEQ ID NO: 912) |
| 4F11 | YPFSNFWIT | IGDIYPGSDNSNYN | AREAYYTNPGFAY |
| | (SEQ ID NO: 874) | (SEQ ID NO: 892) | (SEQ ID NO: 911) |
| 6H6 | FTFSDAWMD | VAEIRNKVNNHATYYA | TSLYDGYYLRFAY |
| | (SEQ ID NO: 876) | (SEQ ID NO: 894) | (SEQ ID NO: 913) |
| 7A9 | FTFNTYSMN | VAHIKTKZNNFATFYA | VZHZSNNYPFAY |
| | (SEQ ID NO: 877) | (SEQ ID NO: 895) | (SEQ ID NO: 914) |
| 7B3 | YTFTTYWIH | IGRNDPNSGGSNYN | VRTNWDGDF |
| | (SEQ ID NO: 878) | (SEQ ID NO: 896) | (SEQ ID NO: 915) |
| 8A1 | YAFSNYWMS | IGQIYPGDGDTKYN | SREKGADYYGSTYSAWFSY |
| | (SEQ ID NO: 879) | (SEQ ID NO: 897) | (SEQ ID NO: 916) |
| 9F5 | YAFSSSWMN | IGRIYPGDGDTNYN | ARLLRNQPGESYAMDY |
| | (SEQ ID NO: 880) | (SEQ ID NO: 898) | (SEQ ID NO: 917) |
| 9F5a | YAFSSSWMN | RIYPGDGDTNYNGEFRV | ARLLRNQPGESYAMDY |
| | (SEQ ID NO: 880) | (SEQ ID NO: 888) | (SEQ ID NO: 917) |
| 9G1 | YIFTTYWIH | IGRIDPNNGDTNYN | VMTGTDFDY |
| | (SEQ ID NO: 881) | (SEQ ID NO: 899) | (SEQ ID NO: 918) |
| 9G3 | FNFNTYAMK | IARIRSNSNDYATNYS | VGHKINNYPFAH |
| | (SEQ ID NO: 882) | (SEQ ID NO: 900) | (SEQ ID NO: 919) |
| 10A9 | YPFSNFWIT | IGDIYPGSDNRNFN | AREAYYTNPGFAY |
| | (SEQ ID NO: 874) | (SEQ ID NO: 901) | (SEQ ID NO: 911) |
| 11A8 | FNFNTYAMN | VARIRSKSNNYATYYA | VRHYSNYGWGFAY |
| | (SEQ ID NO: 883) | (SEQ ID NO: 902) | (SEQ ID NO: 920) |
| 12D9 | YTFSDYYIH | IGYIYPNNGDNGYN | ARRGYYGGSYDY |
| | (SEQ ID NO: 884) | (SEQ ID NO: 903) | (SEQ ID NO: 921) |
| 12F9 | FRFNTYAMT | EGVIRRKSSNFATLYA | VRHKSNKYPFVY |
| | (SEQ ID NO: 885) | (SEQ ID NO: 904) | (SEQ ID NO: 922) |
| 10C1 | FTFSDAWMD | VAEIRNKINNHATYYA | TSLYDGSYLRFAY |
| | (SEQ ID NO: 876) | (SEQ ID NO: 1405) | (SEQ ID NO: 1408) |
| 7E9 | YTFTEYTME | IGGINPNNGGTSYK | ARGGSHYYAMDY |
| | (SEQ ID NO: 869) | (SEQ ID NO: 1406) | (SEQ ID NO: 906) |
| 8C3 | YSFTGYYME | IGRVNPNNGGTSYN | VLTGGYFDY |
| | (SEQ ID NO: 1404) | (SEQ ID NO: 1407) | (SEQ ID NO: 1409) |
| 1B4 | SRFTFSSYAMS | VAAISGGGRYTYYP | ARHYDGYLDY |
| | (SEQ ID NO: 1523) | (SEQ ID NO: 1526) | (SEQ ID NO: 1529) |
| 6H2 | SAFSLTNYAVH | LGVIWSGGSTAFN | ATHYYRSTYAFSY |
| | (SEQ ID NO: 1524) | (SEQ ID NO: 1527) | (SEQ ID NO: 1530) |
| 7B11v1 | SRFTFSSYAMS | VAAISGGGRYTYYP | ARHYDGYLDY |
| | (SEQ ID NO: 1523) | (SEQ ID NO: 1526) | (SEQ ID NO: 1529) |
| 7B11v2 | SGYTFTDFYMN | IGDINPNNGHTTYN | AREPYSYGSSPWYFLV |
| | (SEQ ID NO: 1567) | (SEQ ID NO: 1575) | (SEQ ID NO: 1583) |
| 18D8 | SRFTFSSYAMS | VAAISGGGRYTYYP | ARHYDGYLDY |
| | (SEQ ID NO: 1523) | (SEQ ID NO: 1526) | (SEQ ID NO: 1529) |
| 18E4v1 | SRFTFSSYAVS | VATISGGGRYTYYP | ARHYDGYLDY |
| | (SEQ ID NO: 1525) | (SEQ ID NO: 1528) | (SEQ ID NO: 1529) |
| 18E4v2 | SGYTFTAYWMH | IGRTHPSDSDTNYN | ATYSNYVTGAMDS |
| | (SEQ ID NO: 1568) | (SEQ ID NO: 1576) | (SEQ ID NO: 1584) |
| 29F6v1 | SRFTFSSYAMS | VAAISGGGRYTYYP | ARHYDGYLDY |
| | (SEQ ID NO: 1523) | (SEQ ID NO: 1526) | (SEQ ID NO: 1529) |
| 29F6v2 | SGFNIKNTYIH | IGRIDPAIGNTNYA | VSPGMDY |
| | (SEQ ID NO: 1569) | (SEQ ID NO: 1577) | (SEQ ID NO: 1585) |
| 40D5v1 | SRFTFSSYAMS | VAAISGGGRYTYYP | ARHYDGYLDY |
| | (SEQ ID NO: 1523) | (SEQ ID NO: 1526) | (SEQ ID NO: 1529) |
| 40D5v2 | SGYTFTNYWIH | IGRIHPSDSDINYN | VKTGTSFAS |
| | (SEQ ID NO: 1570) | (SEQ ID NO: 1578) | (SEQ ID NO: 1586) |
| 43B9 | SRFTFSSYAMS | VAAISGGGRYTYYP | ARHYDGYLDY |
| | (SEQ ID NO: 1523) | (SEQ ID NO: 1526) | (SEQ ID NO: 1529) |
| 44A8 | SRFTFSSYAMS | VAAISGGGRYTYYP | ARHYDGYLDY |
| | (SEQ ID NO: 1523) | (SEQ ID NO: 1526) | (SEQ ID NO: 1529) |
| 44B4v1 | SRFTFSSYAMS | VAAISGGGRYTYYP | ARHYDGYLDY |
| | (SEQ ID NO: 1523) | (SEQ ID NO: 1526) | (SEQ ID NO: 1529) |
| 44B4v2 | SGYTFTSATMH | IGYINPNSGYSKYN | ARWGIDGNYGGGFFDV |
| | (SEQ ID NO: 1571) | (SEQ ID NO: 1579) | (SEQ ID NO: 1587) |
| 45D6 | YSFTDYNIH | IGYINPNSDNTRYI | TRGFSNLGAMDY |
| | (SEQ ID NO: 1572) | (SEQ ID NO: 1580) | (SEQ ID NO: 1588) |
| 29F7 | FTLSNYWMN | VAQIRLKSDNYATHYA | TGAGGNHENY |
| | (SEQ ID NO: 1573) | (SEQ ID NO: 1581 | (SEQ ID NO: 1589) |
| 32G1 | YTFTDYNIH | IGYINPNNGGTTYN | ATTYVSFSY |
| | (SEQ ID NO: 1574) | (SEQ ID NO: 1582 | (SEQ ID NO: 1590) |

TABLE 7D
EU or Kabat heavy chain HVR consensus sequences

| | HVR H1 | HVR H2 |
|---|---|---|
| Consen- | YX₁X₂X₃XYXXH | IGXXXPX₁X₂X₃X₄X₅XYX₆ |
| sus 1 | X₁ is T or S | X₁ is N or E |
| | X₂ is F or V | X₂ is N, S, or T |
| | X₃ is T or S | X₃ is G or D |
| | (SEQ ID NO: 1649) | X₄ is G, D, or N |
| | | X₅ is T, S, or N |
| | | X₆ is N, S, K, or I |
| | | (SEQ ID NO: 1656) |
| Consen- | YTFTXYXXH | IGXXXPNNGGTXYN |
| sus 2 | (SEQ ID NO: 1650) | (SEQ ID NO: 1657) |
| Consen- | FTFSDAWMX₁ | VAEIRX₁KX₂X₃NHATYYA |
| sus 3 | X₁ is D or G | X₁ is N or D |
| | (SEQ ID NO: 1651) | X₂ is V or I |
| | | X₃ is N or K |
| | | (SEQ ID NO: 1658) |
| Consen- | FXX₁X₂X₃YX₄MX₅ | XX₁XIX₂X₃X₄X₅X₆X₇X₈ATXYX₉ |
| sus 4 | X₁ is F or L | X₁ is A or G |
| | X₂ is N or S | X₂ is R or K |
| | X₃ is T or N | X₃ is S, T, R, or L |
| | X₄ is A, S, or W | X₄ is K or N |
| | X₅ is N, K, or T | X₅ is S, E, or Q |
| | (SEQ ID NO: 1652) | X₆ is N, S, or D |
| | | X₇ is N or D |
| | | X₈ is Y or F |
| | | X₉ is A or S |
| | | (SEQ ID NO: 1659) |
| Consen- | FXFNTYAMN | XAXIRSKSNNYATXYA |
| sus 5 | (SEQ ID NO: 1653) | (SEQ ID NO: 1660) |
| Consen- | YXFX₁X₂XWX₃X | IGXIX₁PX₂XX₃X₄X₅X₆X₇N |
| sus 6 | Xᵢ is S or T | X₁ is Y or D |
| | X₂ is N, S, or T | X₂ is G or N |
| | X₃ is I or M | X₃ is G or D |
| | (SEQ ID NO: 1654) | X₄ is N or D |
| | | X₅ is T, R, or S |
| | | X₆ is N or K |
| | | X₇ is Y or F |
| | | (SEQ ID NO: 1661) |
| Consen- | YXFSNXWIX | IGXIYPGXGDTNYN |
| sus 7 | (SEQ ID NO: 1655) | (SEQ ID NO: 1662) |

TABLE 7E
EU or Kabat light chain Framework sequences

| | VL | VL | VL | VL |
|---|---|---|---|---|
| Ab ID | FR1 | FR2 | FR3 | FR4 |
| 4D11 | DIZV | WYQL | GVPS | FGGG |
| | TQSP | KQGK | RFSG | TKLE |
| | ASLS | SPQL | SGSG | IK |
| | ASVG | LVY | TQFS | (SEQ |
| | ETVT | (SEQ | LRIN | ID |
| | ITC | ID | SLQP | NO: |
| | (SEQ | NO: | EDFG | 968) |
| | ID | 940) | SYYC | |
| | NO: | | (SEQ | |
| | 923) | | ID | |
| | | | NO: | |
| | | | 950) | |
| 78C5 | DIZV | WYQL | GVPS | FGGG |
| | TQSP | KQGK | RFSG | TKLE |
| | ASLS | SPQL | SGSG | IK |
| | ASVG | LVY | TQFS | (SEQ |
| | ETVT | (SEQ | LRIN | ID |
| | ITC | ID | SLQP | NO: |
| | (SEQ | NO: | EDFG | 968) |
| | ID | 940) | SYYC | |
| | NO: | | (SEQ | |
| | 923) | | ID | |
| | | | NO: | |
| | | | 950) | |
| 6G12 | TMSQ | WYQQ | GVPD | FGAG |
| | SPSS | KPGQ | RFTG | TKLE |
| | LAVS | SPKL | SGSG | LK |
| | VGEK | LIY | TDFT | (SEQ |
| | VTMS | (SEQ | LTIS | ID |
| | C | ID | SVKA | NO: |
| | (SEQ | NO: | EDLA | 969) |
| | ID | 941) | VYYC | |
| | NO: | | (SEQ | |
| | 924) | | ID | |
| | | | NO: | |
| | | | 951) | |
| 8F11 | DVZM | WLLQ | GVPD | FGAG |
| | TQTP | RPGQ | RFAG | TKLE |
| | LTLS | SPKR | SGSG | LK |
| | VTIG | LIY | TDFT | (SEQ |
| | QPAS | (SEQ | LKIS | ID |
| | ISC | ID | RLEA | NO: |
| | (SEQ | NO: | DDLG | 969) |
| | ID | 942) | IYYC | |
| | NO: | | (SEQ | |
| | 925) | | ID | |
| | | | NO: | |
| | | | 952) | |
| 8E10 | DVZM | WLLQ | GVPD | FGGG |
| | TQTP | RPGQ | RFTG | TKLE |
| | LTLS | SPKR | SGSG | IK |
| | VTIG | LIY | TDFT | (SEQ |
| | QPAS | (SEQ | LKIS | ID |
| | ISC | ID | RVEA | NO: |
| | (SEQ | NO: | EDLG | 968) |
| | ID | 942) | VYYC | |
| | NO: | | (SEQ | |
| | 925) | | ID | |
| | | | NO: | |
| | | | 953) | |
| 7E5 | DVZM | WLLQ | GVPD | FGAG |
| | TQTP | RPGQ | RFAG | TKLE |
| | LTLS | SPKR | SGSG | LK |
| | VTIG | LIY | TDFT | (SEQ |
| | QPAS | (SEQ | LKIS | ID |
| | ISC | ID | RLEA | NO: |
| | (SEQ | NO: | DDLG | 969) |
| | ID | 942) | IYYC | |
| | NO: | | (SEQ | |
| | 925) | | ID | |
| | | | NO: | |
| | | | 952) | |
| 7E5v2 | DVVM | WLLQ | GVPD | FGAG |
| | TQTP | RPGQ | RFAG | TKLE |
| | LTLS | SPKR | SGSG | LK |
| | VTIG | LIY | TDFT | (SEQ |
| | QPAS | (SEQ | LKIS | ID |
| | ISC | ID | RLEA | NO: |
| | (SEQ | NO: | DDLG | 969) |
| | ID | 942) | IYYC | |
| | NO: | | (SEQ | |
| | 931) | | ID | |
| | | | NO: | |
| | | | 952) | |
| 7F8 | VLTQ | WYQQ | GVPA | FGGG |
| | SPAL | KPRS | RFSG | TKLV |
| | MSAS | SPKP | SGSG | IK |
| | PGEK | WIY | TSYS | (SEQ |
| | VTMT | (SEQ | LTIN | ID |
| | C | ID | NMEA | NO: |
| | (SEQ | NO: | EDAA | 970) |
| | ID | 943) | TYYC | |
| | NO: | | (SEQ | |
| | 926) | | ID | |
| | | | NO: | |
| | | | 954) | |
| 8F8 | DVZM | WYLQ | GVPD | FGAG |
| | TQTP | KPGQ | RFSG | TKLE |
| | LSLP | SPKL | SGSG | LK |
| | VSLG | LIY | TDFT | (SEQ |
| | DQAS | (SEQ | LKIS | ID |
| | ISC | ID | RVEA | NO: |
| | (SEQ | NO: | EDLG | 969) |
| | ID | 944) | VYFC | |
| | NO: | | (SEQ | |
| | 927) | | ID | |
| | | | NO: | |
| | | | 955) | |
| 1H7 | VLTQ | WYQQ | GVPA | FGGG |
| | SPAI | KPRS | RFSG | TKLV |
| | MZAS | SPKP | SGSG | IK |
| | PGEK | WIY | TSYS | (SEQ |
| | VTMT | (SEQ | LTIS | ID |
| | C | ID | SMEA | NO: |
| | (SEQ | NO: | EDAA | 970) |
| | ID | 943) | TYYC | |
| | NO: | | (SEQ | |
| | 928) | | ID | |
| | | | NO: | |
| | | | 956) | |
| 2H8 | NVLT | WYQQ | GVPA | FGGG |
| | QSPA | KPRS | RFSG | TKLV |
| | LMSA | SPKP | SGSG | IK |
| | SPGE | WIY | TSYS | (SEQ |
| | KVTM | (SEQ | LTIS | ID |
| | TC | ID | SMEA | NO: |
| | (SEQ | NO: | EDAA | 970) |
| | ID | 943) | TYYC | |
| | NO: | | (SEQ | |
| | 929) | | ID | |
| | | | NO: | |
| | | | 956) | |
| 3A2 | DVVM | WYLR | GVPD | FGGG |
| | TQTP | KPGQ | RFSG | TELE |
| | LSLP | SPKL | SGSG | IK |
| | VSLG | LIY | TDFT | (SEQ |
| | DQAS | (SEQ | LKIS | ID |
| | ISC | ID | RVEA | NO: |
| | (SEQ | NO: | EDLG | 971) |
| | ID | 945) | VYYC | |
| | NO: | | (SEQ | |
| | 930) | | ID | |
| | | | NO: | |
| | | | 957) | |
| 3A7 | DVVM | WLLQ | GVPD | FGGG |
| | TQTP | RPGQ | RFAG | TKLE |
| | LTLS | SPKR | SGSG | MK |
| | VTIG | LIY | TDFT | (SEQ |
| | QPAS | (SEQ | ZKIS | ID |
| | ISC | ID | RLEA | NO: |
| | (SEQ | NO: | DDLG | 972) |
| | ID | 942) | IYYC | |
| | NO: | | (SEQ | |
| | 931) | | ID | |
| | | | NO: | |
| | | | 958) | |
| 3B10 | ITMS | WYQQ | GVPD | FGAG |
| | QSPS | KPGQ | RFTG | TKLE |
| | SLAV | SPKL | SGSG | LK |
| | SVGE | LIY | TDFT | (SEQ |
| | KVTM | (SEQ | LTIS | ID |
| | SC | ID | SVKA | NO: |
| | (SEQ | NO: | EDLA | 969) |
| | ID | 941) | VYCC | |
| | NO: | | (SEQ | |
| | 932) | | ID | |
| | | | NO: | |
| | | | 959) | |
| 4F11 | DVZM | WYLR | GVPD | FGGG |
| | TQTP | KPGQ | RFSG | TELE |
| | LSLP | SPKL | SGSG | IK |
| | VSLG | LIY | TDFT | (SEQ |
| | DQAS | (SEQ | LKIS | ID |
| | ISC | ID | RVEG | NO: |
| | (SEQ | NO: | EDLG | 971) |
| | ID | 945) | VYYC | |
| | NO: | | (SEQ | |
| | 927) | | ID | |
| | | | NO: | |
| | | | 960) | |
| 6H6 | QTQS | WYQQ | GVPD | FGAG |
| | PSSL | KPGQ | RFTG | TKLE |
| | AVSA | SPKL | SGFG | LK |
| | GEKV | LIS | TDFT | (SEQ |
| | TLSC | (SEQ | LTIS | ID |
| | (SEQ | ID | SVQG | NO: |
| | ID | NO: | EDLA | 969) |
| | NO: | 1413) | VYYC | |
| | 1410) | | (SEQ | |
| | | | ID | |
| | | | NO: | |
| | | | 1414) | |
| 7A9 | QMSQ | WYQQ | GVPS | FGSG |
| | SPAC | KQGK | RFSG | TKLE |
| | LZAZ | SPKL | RGSG | IK |
| | VGES | VVY | TQFF | (SEQ |
| | VTIT | (SEQ | LKIN | ID |
| | C | ID | SZQR | NO: |
| | (SEQ | NO: | EDFG | 973) |
| | ID | 946) | SYYC | |
| | NO: | | (SEQ | |
| | 933) | | ID | |
| | | | NO: | |
| | | | 961) | |
| 8A1 | DIQM | WYQQ | GVPS | FGGG |
| | TQSP | KQGK | RFSA | TKLE |
| | ASLS | SPQL | SGSA | MN |
| | V | LVY | TQFS | (SEQ |
| | SVGE | (SEQ | LKIN | ID |
| | TVTI | ID | SLQS | NO: |
| | TC | NO: | ADFG | 974) |
| | (SEQ | 947) | SYYC | |
| | ID | | (SEQ | |
| | NO: | | ID | |
| | 934) | | NO: | |
| | | | 962) | |
| 9F5 | DVZM | WYLQ | GVPD | FGGG |
| | TQNP | KPGQ | RFSG | TKLE |
| | LSLP | SPKL | SGSG | IK |
| | VSLG | LI | TDFT | (SEQ |
| | DQAS | Y | LKIS | ID |
| | ISC | (SEQ | RVEA | NO: |
| | (SEQ | ID | DDLG | 968) |
| | ID | NO: | VYLC | |
| | NO: | 944) | (SEQ | |
| | 935) | | ID | |
| | | | NO: | |
| | | | 963) | |
| 9F5v2 | DWMT | WYLQ | GVPD | FGGG |
| | QTPL | KPGQ | RFSG | TKLE |
| | SLP | SPKL | SGSG | IK |
| | VSLG | LI | TDFT | (SEQ |
| | DQAS | Y | LKIS | ID |
| | ISC | (SEQ | RVEA | NO: |
| | (SEQ | ID | DDLG | 968) |
| | ID | NO: | VYFC | |
| | NO: | 944) | (SEQ | |
| | 930) | | ID | |
| | | | NO: | |
| | | | 1668) | |
| 9G1 | DVLM | WYLQ | GVPD | FGGG |
| | TQTP | KPGQ | RFSG | TKLE |
| | LSLP | SPKL | SGSG | IK |
| | VSLG | LIY | TDFT | (SEQ |
| | DQAS | (SEQ | LRIS | ID |
| | ISC | ID | GVEA | NO: |
| | (SEQ | NO: | EDLG | 968) |
| | ID | 944) | VYFC | |
| | NO: | | (SEQ | |
| | 936) | | ID | |
| | | | NO: | |
| | | | 964) | |
| 9G3 | NVLT | WXXX | GVPG | FGGG |
| | QSPA | KPRS | RFSG | TKLE |
| | LIWA | SPKP | SGSG | MK |
| | ZPGE | GIY | TYXS | (SEQ |
| | KVTM | (SEQ | FKIS | ID |
| | TC | ID | SMEG | NO: |
| | (SEQ | NO: | KMGP | 975) |
| | ID | 948) | LIIF | |
| | NO: | | C | |
| | 937) | | (SEQ | |
| | | | ID | |
| | | | NO: | |
| | | | 965) | |
| 10A9 | DWMT | WYLR | GVPD | FGGG |
| | QTPL | KPGQ | RFSG | TELE |
| | SLPV | SPKL | SGSG | IK |
| | SLGD | LI | TDFT | (SEQ |
| | QASI | Y | LKIS | ID |
| | SC | (SEQ | RVEA | NO: |
| | (SEQ | ID | EDLG | 971) |
| | ID | NO: | VYYC | |
| | NO: | 945) | (SEQ | |
| | 930) | | ID | |
| | | | NO: | |
| | | | 957) | |
| 11A8 | DIZM | WYQQ | GVRD | FGGG |
| | TQSP | KPGQ | RFTG | TKLE |
| | SSLT | PZKL | SGZG | MK |
| | VTAG | LIY | TDFT | (SEQ |
| | EKVT | (SEQ | LTIS | ID |
| | MSC | ID | SVQG | NO: |
| | (SEQ | NO: | EDLA | 972) |
| | ID | 949) | IYYC | |
| | NO: | | (SEQ | |
| | 938) | | ID | |
| | | | NO: | |
| | | | 966) | |
| 12D9 | TQSP | WYQQ | GVPD | FGSG |
| | SSLA | KPGQ | RFTG | TKLE |
| | VSVG | SPKL | SGSG | IK |
| | EKVT | LIY | TDFT | (SEQ |
| | MTC | (SEQ | LTIS | ID |
| | (SEQ | ID | TVKA | NO: |
| | ID | NO: | EDLA | 973) |
| | NO: | 941) | VYYC | |
| | 939) | | (SEQ | |
| | | | ID | |
| | | | NO: | |
| | | | 967) | |
| 12F9 | TMSQ | WYQQ | GVPD | FGAG |
| | SPSS | KPGQ | RFTG | TKLE |
| | LAVS | SPKL | SGSG | LK |
| | VGEK | LIY | TDFT | (SEQ |
| | VTMS | (SEQ | LTIS | ID |
| | C | ID | SVKA | NO: |
| | (SEQ | NO: | EDLA | 969) |
| | ID | 941) | VYCC | |
| | NO: | | (SEQ | |
| | 924) | | ID | |
| | | | NO: | |
| | | | 959) | |
| 10C1 | QTQV | WYQQ | GVPD | FGAG |
| | FLSL | KPGQ | RFTG | TKLE |
| | LLWV | SPKL | SGSG | LK |
| | SGTC | LIS | TDFT | (SEQ |
| | GNIM | (SEQ | LTIN | ID |
| | LTQS | ID | SVQA | NO: |
| | PSSL | NO: | EDLA | 969) |
| | AVSA | 1413) | VYYC | |
| | GEKV | | (SEQ | |
| | TLSC | | ID | |
| | (SEQ | | NO: | |
| | ID | | 1415) | |
| | NO: | | | |
| | 1411) | | | |
| 7E9 | DIVM | WYQQ | GVPD | FGAG |
| | SQSP | KPGQ | RFTG | TKLE |
| | SSLA | SPKL | SGSG | LK |
| | VSVG | LIY | TDFT | (SEQ |
| | EKVT | (SEQ | LTIS | ID |
| | MSC | ID | SVKA | NO: |
| | (SEQ | NO: | EDLA | 969) |
| | ID | 941) | VYYC | |
| | NO: | | (SEQ | |
| | 1412) | | ID | |
| | | | NO: | |
| | | | 951) | |
| 8C3 | DWMT | WYLQ | GVPD | FGSG |
| | QTPL | KPGQ | RFSG | TKLE |
| | SLPV | SPKL | SGSG | IK |
| | SLGD | LIY | TDFT | (SEQ |
| | QASI | (SEQ | LKIS | ID |
| | SC | ID | RVEA | NO: |
| | (SEQ | NO: | EDLG | 973) |
| | ID | 944) | VYFC | |
| | NO: | | (SEQ | |
| | 930) | | ID | |
| | | | NO: | |
| | | | 955) | |
| IB4v1 | DIVM | WYQQ | GVPD | FGGG |
| | TQSH | KPGQ | RFTG | TKLE |
| | KFMS | SPKL | SGFG | IK |
| | TSVG | LIY | TDFT | (SEQ |
| | DRVS | (SEQ | FTIS | ID |
| | ITCK | ID | SVQA | NO: |
| | A | NO: | EDLA | 968) |
| | (SEQ | 941) | VYYC | |
| | ID | | (SEQ | |
| | NO: | | ID | |
| | 1531) | | NO: | |
| | | | 1535) | |
| IB4v2 | ZWZT | WFLQ | GVPD | FGAG |
| | QTPL | KPGQ | RFSG | TKLE |
| | SLPV | SPKL | SGSG | LK |
| | SLGD | LIF | TDFT | (SEQ |
| | QASF | (SEQ | LKIS | ID |
| | SCRS | ID | RVEA | NO: |
| | (SEQ | NO: | EDLG | 969) |
| | ID | 1597) | VYFC | |
| | NO: | | (SEQ | |
| | 1591) | | ID NO: | |
| | | | 955) | |
| 6H2 | DVLM | WYLQ | GVPD | FGSG |
| | TQTP | KPGQ | RFSG | TKLE |
| | LSLP | SPKL | SGSG | IK |
| | VSLG | LIY | TDFT | (SEQ |
| | DQAS | (SEQ | LKIS | ID |
| | ISCR | ID | RVEA | NO: |
| | S | NO: | EDLG | 973) |
| | (SEQ | 944) | VYYC | |
| | ID | | (SEQ | |
| | NO: | | ID NO: | |
| | 1532) | | 957) | |
| 7B11 | DIVM | WYQQ | GVPD | FGGG |
| | TQSH | KPGQ | RFTG | TKLE |
| | KFMS | SPKL | SGSG | IK |
| | TSVG | LIY | TDYT | (SEQ |
| | DRVS | (SEQ | LTIS | ID |
| | ITCK | ID | SVQA | NO: |
| | A | NO: | EDLA | 968) |
| | (SEQ | 941) | LYYC | |
| | ID | | (SEQ | |
| | NO: | | ID | |
| | 1531) | | NO: | |
| | | | 1536) | |
| 18D8 | DIVM | WYQQ | GVPD | FGGG |
| | TQSH | KPGQ | RFTG | TKLE |
| | KFMS | SPKL | SGFG | IK |
| | TSIG | LIY | TDFT | (SEQ |
| | ARVS | (SEQ | FTIS | ID |
| | ITCK | ID | SVQA | NO: |
| | A | NO: | EDLA | 968) |
| | (SEQ | 941) | VYYC | |
| | ID | | (SEQ | |
| | NO: | | ID | |
| | 1533) | | NO: | |
| | | | 1535) | |
| 18E4vl | DIVM | WYQQ | GVPD | FGGG |
| | TQSP | KPGQ | RFTG | TKLE |
| | KSMS | SPKL | SGSA | IK |
| | MSVG | LIY | TDFT | (SEQ |
| | ERVT | (SEQ | LTIS | ID |
| | LTCK | ID | SVQA | NO: |
| | A | NO: | EDLA | 968) |
| | (SEQ | 941) | DYHC | |
| | ID | | (SEQ | |
| | NO: | | ID NO: | |
| | 1534) | | 1537) | |
| 18E4v2 | NIVM | WYQQ | GVPD | FGGG |
| | TQSP | KPGQ | RFTG | TKLE |
| | KSMS | SPKL | SGSA | IK |
| | MSVG | LIY | TDFT | (SEQ |
| | ERVT | (SEQ | LTIS | ID |
| | LTCK | ID | SVQA | NO: |
| | A | NO: | EDLA | 968) |
| | (SEQ | 941) | DYHC | |
| | ID | | (SEQ | |
| | NO: | | ID NO: | |
| | 1592) | | 1537) | |
| 18E4v3 | DWMT | WYLQ | GVPD | FGAG |
| | QTPL | KPGQ | RFSG | TKLE |
| | SLPV | SPKL | SGSG | LK |
| | SLGD | LIY | TDFT | (SEQ |
| | QASI | (SEQ | LRIS | ID |
| | SCRS | ID | RVEA | NO: |
| | (SEQ | NO: | EDLG | 969) |
| | ID | 944) | VYFC | |
| | NO: | | (SEQ | |
| | 1593) | | ID | |
| | | | NO: | |
| | | | 1601) | |
| 29F6v1 | DIVM | WYQQ | GVPD | FGGG |
| | TQSH | KPGQ | RFTG | TKLE |
| | KFMS | SPKL | SGSG | IK |
| | TSIG | LIY | TDFT | (SEQ |
| | ARVS | (SEQ | FTIS | ID |
| | ITCK | ID | SVQA | NO: |
| | A | NO: | EDLA | 968) |
| | (SEQ | 941) | VYYC | |
| | ID | | (SEQ | |
| | NO: | | ID | |
| | 1533) | | NO: | |
| | | | 1538) | |
| 29F6v2 | DVVM | WYLQ | GVPD | FGAG |
| | TQTP | KPGQ | RFSG | TKLE |
| | LSLP | SPKL | SGSG | LK |
| | VSLG | LIY | TDFT | (SEQ |
| | DQAS | (SEQ | LKIS | ID |
| | ISCR | ID | RVEA | NO: |
| | S | NO: | EDLG | 969) |
| | (SEQ | 944) | VYFC | |
| | ID | | (SEQ | |
| | NO: | | ID | |
| | 1593) | | NO: | |
| | | | 955) | |
| 40D5 | DIVM | WYQQ | GVPD | FGGG |
| | TQSH | KPGQ | RFTG | TKLE |
| | KFMS | SPKL | SGSG | IK |
| | TSIG | LIY | TDFT | (SEQ |
| | ARVS | (SEQ | FTIS | ID |
| | ITCK | ID | SVQA | NO: |
| | A | NO: | EDLA | 968) |
| | (SEQ | 941) | VYYC | |
| | ID | | (SEQ | |
| | NO: | | ID | |
| | 1533) | | NO: | |
| | | | 1538) | |
| 43B9 | DIVM | WYQQ | GVPD | FGGG |
| | TQSH | KPGQ | RFTG | TKLE |
| | KFMS | SPKL | SGSG | IK |
| | TSIG | LIY | TDFT | (SEQ |
| | ARVS | (SEQ | FTIS | ID |
| | ITCK | ID | SVQA | NO: |
| | A | NO: | EDLA | 968) |
| | (SEQ | 941) | VYYC | |
| | ID | | (SEQ | |
| | NO: | | ID | |
| | 1533) | | NO: | |
| | | | 1538) | |
| 44A8v1 | DIVM | WYQQ | GVPD | FGGG |
| | TQSH | KPGQ | RFTG | TKLE |
| | KFMS | SPKL | SGSG | IK |
| | TSVG | LIY | TDFT | (SEQ |
| | DRVS | (SEQ | FTIS | ID |
| | ITCK | ID | SVQA | NO: |
| | A | NO: | EDLA | 968) |
| | (SEQ | 941) | VYYC | |
| | ID | | (SEQ | |
| | NO: | | ID | |
| | 1531) | | NO: | |
| | | | 1538) | |
| 44A8v2 | DIVL | WYQQ | GVPA | FGGG |
| | TQSP | KPGQ | RFSG | TKLE |
| | ASLA | PPKL | SGSG | IK |
| | VSLG | LIY | TDFS | (SEQ |
| | QRAT | (SEQ | LNIH | ID |
| | ISCR | ID | PVEE | NO: |
| | A | NO: | DDIA | 968) |
| | (SEQ | 1598) | MYFC | |
| | ID | | (SEQ | |
| | NO: | | ID | |
| | 1594) | | NO: | |
| | | | 1602) | |
| 44B4v1 | DIVM | WYQQ | GVPD | FGGG |
| | TQSH | KPGQ | RFTG | TKLE |
| | KFMS | SPKL | SGSG | IK |
| | TSIG | LIY | TDFT | (SEQ |
| | ARVS | (SEQ | FTIS | ID |
| | ITCK | ID | SVQA | NO: |
| | A | NO: | EDLA | 968) |
| | (SEQ | 941) | VYYC | |
| | ID | | (SEQ | |
| | NO: | | ID | |
| | 1533) | | NO: | |
| | | | 1538) | |
| 44B4v2 | DIQM | WYQQ | GVPS | FGGG |
| | TQFP | KQGK | RFSG | TKLE |
| | ASLA | SPQL | SGSG | IK |
| | AXVG | LIY | TQYS | (SEQ |
| | ESVT | (SEQ | MKIN | ID |
| | ITCR | ID | SMQP | NO: |
| | A | NO: | EDTA | 968) |
| | (SEQ | 1599) | IYFC | |
| | ID | | (SEQ | |
| | NO: | | ID NO: | |
| | 1595) | | 1603) | |
| 29F7 | ILLT | WYQQ | GIPS | FGAG |
| | QSPA | RTNG | RFSG | TKLE |
| | ILSV | SPRL | SGSG | LK |
| | SPGE | LIK | TDFT | (SEQ |
| | RVSF | (SEQ | LNIN | ID |
| | SC | ID | SVES | NO: |
| | (SEQ | NO: | EDIA | 969) |
| | ID | 1600) | DYYC | |
| | NO: | | (SEQ | |
| | 1596) | | ID NO: | |
| | | | 1604) | |
| 32G1 | DVVM | WYLQ | GVPD | FGAG |
| | TQTP | KPGQ | RFSG | TKLE |
| | LSLP | SPKL | SGSG | LK |
| | VSLG | LIY | TDFT | (SEQ |
| | DQAS | (SEQ | LKIS | ID |
| | ISC | ID | RVEA | NO: |
| | (SEQ | NO: | EDLG | 969) |
| | ID | 944) | VYFC | |
| | NO: | | (SEQ | |
| | 930) | | ID NO: | |
| | | | 955) | |

TABLE 7F
EU or Kabat heavy chain
Framework sequences

| Ab ID | VH FR1 | VH FR2 | VH FR3 | VH FR4 |
|---|---|---|---|---|
| 44D11 | EVKL | WVRQ | DSVQ | WGQG |
| | VESG | TPEK | GRFT | TLVT |
| | GGLV | RLEW | FSRD | VSA |
| | KPGG | (SEQ | NARN | (SEQ |
| | SLKL | ID | ILYL | ID |
| | SCAA | NO: | QMSS | NO: |
| | SG | 995) | LRSE | 1029) |
| | (SEQ | | DTAM | |
| | ID | | YYC | |
| | NO: | | (SEQ | |
| | 976) | | ID NO: | |
| | | | 1008) | |
| 78C5 | EVKL | WVRQ | DSVQ | WGQG |
| | VESG | TPEK | GRFT | TLVT |
| | GGLV | RLEW | FSRD | VSA |
| | KPGG | (SEQ | NARN | (SEQ |
| | SLKL | ID | ILYL | ID |
| | SCAA | NO: | QMSS | NO: |
| | SG | 995) | LRSE | 1029) |
| | (SEQ | | DTAM | |
| | ID | | YYC | |
| | NO: | | (SEQ | |
| | 976) | | ID NO: | |
| | | | 1008) | |
| 6G12 | EVQL | WVKQ | QKFK | WGQG |
| | QQSG | SHGK | GKAS | TSVT |
| | PELV | SLEW | LTVD | VSS |
| | KPGT | (SEQ | KSSS | (SEQ |
| | SVKI | ID | TAYM | ID |
| | SCKT | NO: | ELHS | NO: |
| | SG | 996) | LASD | 1030) |
| | (SEQ | | DSAV | |
| | ID | | YYC | |
| | NO: | | (SEQ | |
| | 977) | | ID NO: | |
| | | | 1009) | |
| 8EI0 | QVQL | WVKQ | QKFK | WGQG |
| | QQSG | TPVH | GKAI | TSVT |
| | AELV | GLEW | LTAD | VSS |
| | RPGA | (SEQ | K SSST | (SEQ |
| | SVTL | ID | AYME | ID |
| | SCKA | NO: | LRSL | NO: |
| | SG | 997) | TSED | 1030) |
| | (SEQ | | SAVY | |
| | ID | | YC | |
| | NO: | | (SEQ | |
| | 978) | | ID NO: | |
| | | | 1010) | |
| 7E5 | EVKL | WVRQ | ESVK | WGQG |
| | EESG | SPEK | GRFT | TTLT |
| | GGLV | GLEW | ISRD | VSS |
| | QPGG | (SEQ | DSKS | (SEQ |
| | SMKL | ID | TVYL | ID |
| | SCAA | NO: | QMNT | NO: |
| | SG | 998) | LRAD | 1031) |
| | (SEQ | | DTGI | |
| | ID | | YYC | |
| | NO: | | (SEQ | |
| | 979) | | ID NO: | |
| | | | 1011) | |
| 7F8 | EVQL | WVRQ | DSVK | WGTG |
| | VESG | APGK | DRIT | TTVT |
| | GGLV | GLEW | CSRD | VST |
| | QPKG | (SEQ | DSEN | (SEQ |
| | SLKL | ID | MFYL | ID |
| | SCAA | NO: | QLSS | NO: |
| | SG | 999) | LKTE | 1032) |
| | (SEQ | | DT | |
| | ID | | AMYYC | |
| | NO: | | (SEQ | |
| | 980) | | ID NO: | |
| | | | 1012) | |
| 8F8 | QVQL | WVKQ | EKFK | WGQG |
| | QQSG | RPGR | TKAT | TTLT |
| | AELV | GLEW | LTVD | VSS |
| | KPGA | (SEQ | K PS | (SEQ |
| | SVKL | ID | STAY | ID |
| | SCKA | NO: | MQVS | NO: |
| | SG | 1000) | SLTS | 1031) |
| | (SEQ | | EDSA | |
| | ID | | VYYC | |
| | NO: | | (SEQ | |
| | 981) | | ID NO: | |
| | | | 1013) | |
| IH7 | ZVQL | WVRQ | DSVK | WGTG |
| | VESG | APGK | DRFT | TTVT |
| | GGLV | GLEW | CSRD | VSS |
| | QPKG | (SEQ | DSEN | (SEQ |
| | SLKL | ID | MFYL | ID |
| | SCAA | NO: | QLSS | NO: |
| | SG | 999) | LKTE | 1033) |
| | (SEQ | | DTAI | |
| | ID | | YYC | |
| | NO: | | (SEQ | |
| | 982) | | ID NO: | |
| | | | 1014) | |
| 2HS | EVQL | WVRQ | DSVK | WGTG |
| | VESG | APGK | DRFT | TTVT |
| | GGLV | GLEW | CSRD | VSS |
| | QPKG | (SEQ | DSEN | (SEQ |
| | SLKL | ID | MFYL | ID |
| | SCAA | NO: | QLSS | NO: |
| | SG | 999) | LKTE | 1033) |
| | (SEQ | | DT A | |
| | ID | | MYYC | |
| | NO: | | (SEQ | |
| | 980) | | ID NO: | |
| | | | 1015) | |
| 3A2 | QVQL | WVKQ | EKFK | WGQG |
| | QQSG | RPGQ | TKAT | TLVT |
| | AELV | GLVW | LT | VST |
| | KPGA | (SEQ | VDTS | (SEQ |
| | SVKM | ID | SSTA | ID |
| | SCKT | NO: | YMHL | NO: |
| | SG | 1001) | S SL | 1034) |
| | (SEQ | | TSED | |
| | ID | | SAVY | |
| | NO: | | FC | |
| | 983) | | (SEQ | |
| | | | ID NO: | |
| | | | 1016) | |
| 3A7 | EVKL | WVRQ | ESVK | WGQG |
| | EESG | SPEK | GRFT | TTLT |
| | GGLV | GLEW | ISRD | VSS |
| | QPGG | (SEQ | DSKS | (SEQ |
| | SMKL | ID | TVYL | ID |
| | SCAA | NO: | QMNT | NO: |
| | SG | 998) | LRAD | 1031) |
| | (SEQ | | DTGI | |
| | ID | | YYC | |
| | NO: | | (SEQ | |
| | 979) | | ID NO: | |
| | | | 1011) | |
| 3B10 | EVQL | GVPQ | DSVK | WGQG |
| | VZZG | GPGK | DRFT | TIVT |
| | RGZS | GREW | ZSRD | VS |
| | QGKG | (SEQ | DSES | (SEQ |
| | SXZZ | ID | LFYZ | ID |
| | GRAZ | NO: | QMSZ | NO: |
| | RC | 1002) | ZKZE | 1035) |
| | (SEQ | | DTAM | |
| | ID | | YYZ | |
| | NO: | | (SEQ | |
| | 984) | | ID NO: | |
| | | | 1017) | |
| 4F11 | QVQL | WVKQ | EKFK | WGQG |
| | QQSG | RPGQ | TKAT | TLVT |
| | AELV | GLVW | LT VDT | VST |
| | KPGA | (SEQ | SSSTA | (SEQ |
| | SVKM | ID | YMHL | ID |
| | SCKT | NO: | S SLT | NO: |
| | SG | 1001) | SEDS | 1034) |
| | (SEQ | | AVYF | |
| | ID | | C | |
| | NO: | | (SEQ | |
| | 983) | | ID NO: | |
| | | | 1016) | |
| 6H6 | EVKL | WVRQ | ESVK | WGQG |
| | EESG | SPEK | GRFT | TLVT |
| | GGLV | GLEW | ISRD | VSA |
| | QPGG | (SEQ | DSKS | (SEQ |
| | SMKL | ID | TVYL | ID |
| | SCTA | NO: | QMNS | NO: |
| | SG | 998) | LRTE | 1029) |
| | (SEQ | | DTGI | |
| | ID | | YYC | |
| | NO: | | (SEQ | |
| | 985) | | ID NO: | |
| | | | 1018) | |
| 7A9 | LSCA | WVRQ | DSVK | WGQG |
| | ASG | APGK | DRFT | TLVT |
| | (SEQ | GLEW | ISRD | VSA |
| | ID | (SEQ | DSES | (SEQ |
| | NO: | ID | MLYL | ID |
| | 986) | NO: | QMZN | NO: |
| | | 999) | LKTE | 1029) |
| | | | DTAM | |
| | | | YYC | |
| | | | (SEQ | |
| | | | ID NO: | |
| | | | 1019) | |
| 7B3 | QVQL | WVKQ | EKFR | WGQG |
| | QQSG | RPGR | NKAI | TTLT |
| | AVLV | GPEW | LTVD | VSS |
| | KPGA | (SEQ | KPSS | (SEQ |
| | SVKL | ID | TAYM | ID |
| | SCKA | NO: | QLNS | NO: |
| | SG | 1003) | LTSE | 1031) |
| | (SEQ | | DZAV | |
| | ID | | YYC | |
| | NO: | | (SEQ | |
| | 987) | | ID NO: | |
| | | | 1020) | |
| 8A1 | EVQL | WVKQ | GKFE | WGQG |
| | QQSG | RPGK | GKAT | TLVT |
| | AELV | GLEW | LT A | VSA |
| | KPGA | | DKS | (SEQ |
| | SVKI | (SEQ | SS | ID |
| | SCKA | ID | TAYM | NO: |
| | SG | NO: | QLS S | 1029) |
| | (SEQ | 1004) | LTS | |
| | ID | | EDSAV | |
| | NO: | | YFC | |
| | 988) | | (SEQ | |
| | | | ID NO: | |
| | | | 1021) | |
| 9F5 | QVQL | WVKQ | GEFR | WGQG |
| | QQSG | RPGK | VRAT | ASVT |
| | PELV | GLEW | LTAD | VSS |
| | KPGA | | TSST | (SEQ |
| | SLKI | (SEQ | TAYM | ID |
| | SCKA | ID | QLS | NO: |
| | SG | NO: | SLTS | 1036) |
| | (SEQ | 1004) | EDSA | |
| | ID | | VYFC | |
| | NO: | | (SEQ | |
| | 989) | | ID NO: | |
| | | | 1022) | |
| 9G1 | QVQL | WVKQ | EKFK | WGQG |
| | QQSG | RPGR | TKAT | TTLT |
| | AELV | GPEW | LTVD | VSS |
| | KPGA | (SEQ | KPSS | (SEQ |
| | SVKL | ID | TADM | ID |
| | SCKA | NO: | QLSS | NO: |
| | SG | 1003) | LTSE | 1031) |
| | (SEQ | | DSAV | |
| | ID | | YYC | |
| | NO: | | (SEQ | |
| | 981) | | ID NO: | |
| | | | 1023) | |
| 9G3 | EVQL | WVRQ | DSVK | WGRG |
| | VESG | TPGK | DRFT | TLV |
| | GGLV | GLEW | ISRD | (SEQ |
| | QPKG | (SEQ | DSESI | ID |
| | SLKL | ID | VYVQ | NO: |
| | SCAA | NO: | MNNL | 1037) |
| | FG | 1005) | KTED | |
| | (SEQ | | TG | |
| | ID | | MYSC | |
| | NO: | | (SEQ | |
| | 990) | | ID NO: | |
| | | | 1024) | |
| 10A9 | QVQL | WVKQ | ERFK | WGQG |
| | QQSG | RPGQ | TKAT | TLVT |
| | AEVV | GLVW | LT V | VSA |
| | KPGA | (SEQ | DTS | (SEQ |
| | SVKM | ID | SSTA | ID |
| | SCKT | NO: | YM | NO: |
| | SG | 1001) | HLS S | 1029) |
| | (SEQ | | LTS | |
| | ID | | EDSAV | |
| | NO: | | YFC | |
| | 991) | | (SEQ | |
| | | | ID NO: | |
| | | | 1025) | |
| 11A8 | EVQL | WVRQ | DSVK | WGQG |
| | VESG | APGK | DRFT | TLVT |
| | GRLV | GLEW | ISRD | VSA |
| | QPKG | (SEQ | DSES | (SEQ |
| | SLKL | ID | MLYL | ID |
| | SCAA | NO: | QMNN | NO: |
| | SG | 999) | LKTE | 1029) |
| | (SEQ | | DTA | |
| | ID | | MYYC | |
| | NO: | | (SEQ | |
| | 992) | | ID NO: | |
| | | | 1026) | |
| 12D9 | QVQL | WMKQ | QEFK | WGQ |
| | QQYG | SHGK | GKAT | GT |
| | PELV | SLEW | LT V | (SEQ |
| | KPGA | (SEQ | DKS | ID |
| | SVKM | ID | SS | NO: |
| | SCKV | NO: | TAYM | 1038) |
| | SG | 1006) | ELRS | |
| | (SEQ | | LTFE | |
| | ID | | D SAV | |
| | NO: | | YZC | |
| | 993) | | (SEQ | |
| | | | ID NO: | |
| | | | 1027) | |
| 12F9 | WRIG | RVRQ | DSVK | WGQG |
| | QGKG | GPGK | DRFR | TLVT |
| | SLKL | GREW | ASRD | VSA |
| | ARAA | (SEQ | DSES | (SEQ |
| | RG | ID | MLYV | ID |
| | (SEQ | NO: | QMSN | NO: |
| | ID | 1007) | WKQE | 1029) |
| | NO: | | DT | |
| | 994) | | AMYYG | |
| | | | (SEQ | |
| | | | ID NO: | |
| | | | 1028) | |
| iOCi | GVQS | WVRQ | ESVK | WGQG |
| | EVKF | SPEK | GRFT | TLVT |
| | EESG | GLEW | ISRD | VSA |
| | GGLV | (SEQ | DSKS | (SEQ |
| | QPGG | ID | S | ID |
| | SMKL | NO: | VSLQ | NO: |
| | SCTA | 998) | MNSL | 1029) |
| | SG | | RTED | |
| | (SEQ | | TGIY | |
| | ID | | YC | |
| | NO: | | (SEQ | |
| | 1416) | | ID NO: | |
| | | | 1419) | |
| 7E9 | QVQL | WVKQ | QKFKG | WGQ |
| | QQSG | SHGK | K ATLT | GTS |
| | PELV | SLEW | VDRS | VTV |
| | KPGA | (SEQ | SS | SS |
| | SVKI | ID | TAYM | (SEQ |
| | SCKT | NO: | ELRS | ID |
| | SG | 996) | LTSE | NO: |
| | (SEQ | | DSAV | 1030) |
| | ID | | YYC | |
| | NO: | | (SEQ | |
| | 1417) | | ID NO: | |
| | | | 1420) | |
| SC3 | QVQL | WVKQ | QKFKG | WGQG |
| | QQSG | SHGK | K AILT | TTLT |
| | PDLV | SLEW | VDKS | VSS |
| | KPGA | (SEQ | SS | (SEQ |
| | SVKI | ID | TAYM | ID |
| | SCKA | NO: | ELRS | NO: |
| | SG | 996) | LTSE | 1031) |
| | (SEQ | | DSAV | |
| | ID | | YYC | |
| | NO: | | (SEQ | |
| | 1418) | | ID NO: | |
| | | | 1421) | |
| 1B4 | EVQL | WVRQ | DSMK | WGQG |
| | VESG | TPEK | GRFT | TTL |
| | GGLV | RLEW | ISRD | TVSS |
| | KPGG | (SEQ | NAKN | (SEQ |
| | SLKL | ID | F | ID |
| | SCEA | NO: | LYLQ | NO: |
| | (SEQ | 995) | MSSL | 1031) |
| | ID | | RSED | |
| | NO: | | TAMY | |
| | 1539) | | YC | |
| | | | (SEQ | |
| | | | ID NO: | |
| | | | 1542) | |
| 6H2 | QVQL | WIRQ | AAFI | WGQG |
| | QESG | SPGK | SRLN | TLVT |
| | PGLV | GLEW | ISKD | VSA |
| | QPSQ | (SEQ | NSK SQ | (SEQ |
| | SLSI | ID | VFFK | ID |
| | ICTV | NO: | MNSL | NO: |
| | (SEQ | 1541) | QSDD | 1029) |
| | ID | | TA IY | |
| | NO: | | YC | |
| | 1540) | | (SEQ | |
| | | | ID NO: | |
| | | | 1543) | |
| 7B1lvl | EVQL | WVRQ | DSMK | WGQG |
| | VESG | TPEK | GRFT | TTLT |
| | GGLV | RLEW | ISRD | VSS |
| | KPGG | (SEQ | NAKN | (SEQ |
| | SLKL | ID | F | ID |
| | SCEA | NO: | LYLQ | NO: |
| | (SEQ | 995) | MSSL | 1031) |
| | ID | | RSED | |
| | NO: | | TAMY | |
| | 1539) | | YC | |
| | | | (SEQ | |
| | | | ID NO: | |
| | | | 1542) | |
| 7B1lv2 | EVQZ | WVKQ | QKFK | RGTG |
| | QQSG | SLGK | GKAT | TTVT |
| | PELV | SLEW | LTVD | V |
| | KPGA | (SEQ | KSSS | (SEQ |
| | SVKI | ID | T | ID |
| | SCKA | NO: | AYME | NO: |
| | (SEQ | 1613) | LRSL | 1626) |
| | ID | | TXEE | |
| | NO: | | SAVY | |
| | 1605) | | YC | |
| | | | (SEQ | |
| | | | ID NO: | |
| | | | 1618) | |
| 18D8 | EVQL | WVRQ | DSMK | WGQG |
| | VESG | TPEK | GRFT | TTLT |
| | GGLV | RLEW | ISRD | VSS |
| | KPGG | (SEQ | NAKN | (SEQ |
| | SLKL | ID | F | ID |
| | SCEA | NO: | LYLQ | NO: |
| | (SEQ | 995) | MSSL | 1031) |
| | ID | | RSED | |
| | NO: | | TAMY | |
| | 1539) | | YC | |
| | | | (SEQ | |
| | | | ID NO: | |
| | | | 1542) | |
| 18E4v1 | EVQL | WVRQ | DSMK | WGQG |
| | VESG | TPEK | GRFT | TTLT |
| | GGLV | RLEW | ISRD | VSS |
| | KPGG | (SEQ | NAKN | (SEQ |
| | SLKL | ID | FLYL | ID |
| | SCEA | NO: | QMSS | NO: |
| | (SEQ | 995) | LRSE | 1031) |
| | ID | | DTAM | |
| | NO: | | YYC | |
| | 1539) | | (SEQ | |
| | | | ID NO: | |
| | | | 1542) | |
| 18E4v2 | QVQL | WVKE | HNFK | WGQG |
| | QQPG | KPGQ | GKAT | TSVT |
| | AELV | GLEW | LTVD | VSS |
| | KPGA | (SEQ | KSSS | (SEQ |
| | SVKV | ID | TAYM | ID |
| | SCKA | NO: | QLNS | NO: |
| | (SEQ | 1614) | LTSE | 1030) |
| | ID | | DSAV | |
| | NO: | | YYC | |
| | 1606) | | (SEQ | |
| | | | ID NO: | |
| | | | 1619) | |
| 29F6v1 | EVQL | WVRQ | DSMK | WGQG |
| | VESG | TPEK | GRFT | TTLT |
| | GGLV | RLEW | ISRD | VSS |
| | KPGG | (SEQ | NAKN | (SEQ |
| | SLKL | ID | FLYL | ID |
| | SCEA | NO: | QMSS | NO: |
| | (SEQ | 995) | LRSE | 1031) |
| | ID | | DTAM | |
| | NO: | | YYC | |
| | 1539) | | (SEQ | |
| | | | ID NO: | |
| | | | 1542) | |
| 29F6v2 | QVQL | WVKQ | PKFQ | WGHG |
| | QQSV | RPEQ | ATAT | TSVT |
| | AELV | GLEW | IT V | VSS |
| | RPGA | (SEQ | ATS | (SEQ |
| | SVKL | ID | SNSA | ID |
| | SCTA | NO: | YLQL | NO: |
| | (SEQ | 1615) | SSL A | 1627) |
| | ID | | SEDT | |
| | NO: | | AIYYC | |
| | 1607) | | (SEQ | |
| | | | ID NO: | |
| | | | 1620) | |
| 40D5v1 | EVQL | WVRQ | DSMK | WGQG |
| | VESG | TPEK | GRFT | TTLT |
| | GGLV | RLEW | ISRD | VSS |
| | KPGG | (SEQ | NAKN | (SEQ |
| | SLKL | ID | FLYL | ID |
| | SCEA | NO: | QMSS | NO: |
| | (SEQ | 995) | LRSE | 1031) |
| | ID | | DTAM | |
| | NO: | | YYC | |
| | 1539) | | (SEQ | |
| | | | ID NO: | |
| | | | 1542) | |
| 40D5v2 | QVQL | WVKQ | QKFK | WSQG |
| | QQSG | RPGQ | GKAT | TLVT |
| | AELV | GLEW | LTVD | VS |
| | KPGA | (SEQ | KSSS | (SEQ |
| | SVKV | ID | TAYM | ID |
| | SCKA | NO: | QILS | NO: |
| | (SEQ | 1616) | SLTS | 1628) |
| | ID | | EDSA | |
| | NO: | | VYYC | |
| | 1608) | | (SEQ | |
| | | | ID NO: | |
| | | | 1621) | |
| 43B9 | EVQL | WVRQ | DSMK | WGQG |
| | VESG | TPEK | GRFT | TTLT |
| | GGLV | RLEW | ISRD | VSS |
| | KPGG | (SEQ | NAKN | (SEQ |
| | SLKL | ID | FLYL | ID |
| | SCEA | NO: | QMSS | NO: |
| | (SEQ | 995) | LRSE | 1031) |
| | ID | | DTAM | |
| | NO: | | YYC | |
| | 1539) | | (SEQ | |
| | | | ID NO: | |
| | | | 1542) | |
| 44A8 | EVQL | WVRQ | DSMK | WGQG |
| | VESG | TPEK | GRFT | TTLT |
| | GGLV | RLEW | ISRD | VSS |
| | KPGG | (SEQ | NAKN | (SEQ |
| | SLKL | ID | FLYL | ID |
| | SCEA | NO: | QMSS | NO: |
| | (SEQ | 995) | LRSE | 1031) |
| | ID | | DTAM | |
| | NO: | | YYC | |
| | 1539) | | (SEQ | |
| | | | ID NO: | |
| | | | 1542) | |
| 44B4v1 | EVQL | WVRQ | DSMK | WGQG |
| | VESG | TPEK | GRFT | TTLT |
| | GGLV | RLEW | ISRD | VSS |
| | KPGG | (SEQ | NAKN | (SEQ |
| | SLKL | ID | FLYL | ID |
| | SCEA | NO: | QMSS | NO: |
| | (SEQ | 995) | LRSE | 1031) |
| | ID | | DTAM | |
| | NO: | | YYC | |
| | 1539) | | (SEQ | |
| | | | ID NO: | |
| | | | 1542) | |
| 44B4v2 | XXXX | WVKQ | QKFK | WGTG |
| | XQSG | RPGQ | DKAT | TTVT |
| | TELA | GLEW | LTAD | VSS |
| | RPGA | (SEQ | KSSS | (SEQ |
| | SVKM | ID | TAYM | ID |
| | PCKA | NO: | QLSS | NO: |
| | (SEQ | 1616) | LTSE | 1033) |
| | ID | | ESAV | |
| | NO: | | YYC | |
| | 1609) | | (SEQ | |
| | | | ID NO: | |
| | | | 1622) | |
| 45D6 | QVQL | WVIQ | QKFK | WGQG |
| | QQSG | SHGE | GKAT | TSVT |
| | RELV | SLEW | LTVN | VSS |
| | KPGA | (SEQ | KS S | (SEQ |
| | SVKM | ID | STA | ID |
| | SCMS | NO: | YMEL | NO: |
| | SG | 1617) | RSLT | 1030) |
| | (SEQ | | SEDS | |
| | ID | | AVYYC | |
| | NO: | | (SEQ | |
| | 1610) | | ID NO: | |
| | | | 1623) | |
| 29F7 | QVKL | WVRQ | ESVK | WGQG |
| | EESG | SPEK | GRFT | TTLT |
| | GGLV | GLEW | ISRD | VSS |
| | QPGG | (SEQ | DSKS | (SEQ |
| | SMKL | ID | SVYL | ID |
| | SCVA | NO: | QMNN | NO: |
| | SG | 998) | LRAV | 1031) |
| | (SEQ | | DTGI | |
| | ID | | YYC | |
| | NO: | | (SEQ | |
| | 1611) | | ID NO: | |
| | | | 1624) | |
| 32G1 | QVQL | WVKQ | QKFK | WGQG |
| | QQSG | SHGK | GKAT | TLVT |
| | PELV | SLEW | LTVN | VSA |
| | KPGA | (SEQ | KS S | (SEQ |
| | SVQM | ID | STAY | ID |
| | SCEA | NO: | IELR | NO: |
| | SG | 996) | SLTS | 1029) |
| | (SEQ | | EDS | |
| | ID | | AVYHC | |
| | NO: | | (SEQ | |
| | 1612) | | ID NO: | |
| | | | 1625) | |

TABLE 7G
Humanized light chain variable
region sequences

| Antibody variant | Humanized sequences |
|---|---|
| Antibody 4D11 | Antibody 4D11 |
| 4D11V3-15 | EIVMTQSPATLSVSPGERAT |
| | LSCRASENIYSFLAWYQQKP |
| | GQAPRLLIYNSKTFAEGIPA |
| | RFSGSGSGTEFTLTISSLQS |
| | EDFAVYYCQHHYGTPPWTF |
| | GQGTKVEIK |
| | (SEQ ID NO: 1040) |
| 4D11V1-9 | DIQLTQSPSFLSASVGDRVT |
| | ITCRASENIYSFLAWYQQKP |
| | GKAPKLLIYNSKTFAEGVPS |
| | RFSGSGSGTEFTLTISSLQP |
| | EDFATYYCQHHYGTPPWTFG |
| | QGTKVEIK |
| | (SEQ ID NO: 1041) |
| 4D11V3-11 | EIVLTQSPATLSLSPGERAT |
| | LSCRASENIYSFLAWYQQKP |
| | GQAPRLLIYNSKTFAEGIPA |
| | RFSGSGSGTDFTLTISSLEP |
| | EDFAVYYCQHHYGTPPWTFG |
| | QGTKVEIK |
| | (SEQ ID NO: 1042) |
| 4D11V1-5 | DIQMTQSPSTLSASVGDRVT |
| | ITCRASENIYSFLAWYQQKP |
| | GKAPKLLIYNSKTFAEGVPS |
| | RFSGSGSGTEFTLTISSLQP |
| | DDFATYYCQHHYGTPPWT |
| | FGQGTKVEIK |
| | (SEQ ID NO: 1043) |
| 4D11V1-39 | DIQMTQSPSSLSASVGDRVT |
| | ITCRASEMYSFLAWYQQKPG |
| | KAPKLLIYNSKTFAEGVPSR |
| | FSGSGSGTDFTLTISSLQPE |
| | DFATYYCQHHYGTPPWTF |
| | GQGTKVEIK |
| | (SEQ ID NO: 1044) |
| 4D11V1-33 | DIQMTQSPSSLSASVGDRVT |
| | ITCRASENIYSFLAWYQQKP |
| | GKAPKLLIYNSKTFAEGVPS |
| | RFSGSGSGTDFTFTISSLQP |
| | EDIATYYCQHHYGTPPWTFG |
| | QGTKVEIK |
| | (SEQ ID NO: 1045) |
| 4D11V3-20 | EIVLTQSPGTLSLSPGERAT |
| | LSCRASENIYSFLAWYQQKP |
| | GQAPRLLIYNSKTFAEGIPD |
| | RFSGSGSGTDFTLTISRLEP |
| | EDFAVYYCQHHYGTPPWT |
| | FGQGTKVEIK |
| | (SEQ ID NO: 1046) |
| 4D11V2-28 | DIVMTQSPLSLPVTPGEPAS |
| | ISCRASENIYSFLAWYLQKP |
| | GQSPQLLIYNSKTFAEGVPD |
| | RFSGSGSGTDFTLKISRVEA |
| | EDVGVYYCQHHYGTPPWTF |
| | GQGTKVEIK |
| | (SEQ ID NO: 1047) |
| 4D11V2-30 | DVVMTQSPLSLPVTLGQPAS |
| | ISCRASENIYSFLAWFQQRP |
| | GQSPRRLIYNSKTFAEGVPD |
| | RFSGSGSGTDFTLKISRVEA |
| | EDVGVYYCQHHYGTPPWTFG |
| | QGTKVEIK |
| | (SEQ ID NO: 1048) |
| 4D11V4-1 | DIVMTQSPDSLAVSLGERAT |
| | INCRASENIYSFLAWYQQKP |
| | GQPPKLLIYNSKTFAEGVPD |
| | RFSGSGSGTDFTLTISSLQA |
| | EDVAVYYCQHHYGTPPWTFG |
| | QGTKVEIK |
| | (SEQ ID NO: 1049) |
| Antibody 7C5 | Antibody 7C5 |
| 7C5V3-15 | EIVMTQSPATLSVSPGERAT |
| | LSCRASENIYSFLAWYQQKP |
| | GQAPRLLIYNSKTFAEGIPA |
| | RFSGSGSGTEFTLTISSLQS |
| | EDFAVYYCQHHYGTPPWTFG |
| | QGTKVEIK |
| | (SEQ ID NO: 1040) |
| 7C5V1-9 | DIQLTQSPSFLSASVGDRVT |
| | ITCRASENIYSFLAWYQQKP |
| | GKAPKLLIYNSKTFAEGVPS |
| | RFSGSGSGTEFTLTISSLQP |
| | DDFATYYCQHHYGTPPWTFG |
| | QGTKVEIK |
| | (SEQ ID NO: 1041) |
| 7C5V3-11 | EIVLTQSPATLSLSPGERAT |
| | LSCRASENIYSFLAWYQQKP |
| | GQAPRLLIYNSKTFAEGIPA |
| | RFSGSGSGTDFTLTISSLEP |
| | EDFAVYYCQHHYGTPPWT |
| | FGQGTKVEIK |
| | (SEQ ID NO: 1042) |
| 7C5V1-5 | DIQMTQSPSTLSASVGDRVT |
| | ITCRASENIYSFLAWYQQKP |
| | GKAPKLLIYNSKTFAEGVPS |
| | RFSGSGSGTEFTLTISSLQP |
| | DDFATYYCQHHYGTPPWTFG |
| | QGTKVEIK |
| | (SEQ ID NO: 1043) |
| 7C5V1-39 | DIQMTQSPSSLSASVGDRVT |
| | ITCRASENIYSFLAWYQQKP |
| | GKAPKLLIYNSKTFAEGVPS |
| | RFSGSGSGTDFTLTISSLQP |
| | EDFATYYCQHHYGTPPWTFG |
| | QGTKVEIK |
| | (SEQ ID NO: 1044) |
| 7C5V1-33 | DIQMTQSPSSLSASVGDRVT |
| | ITCRASENIYSFLAWYQQKP |
| | GKAPKLLIYNSKTFAEGVPS |
| | RFSGSGSGTDFTFTISSLQP |
| | EDIATYYCQHHYGTPPWTFG |
| | QGTKVEIK |
| | (SEQ ID NO: 1045) |
| 7C5V3-20 | EIVLTQSPGTLSLSPGERAT |
| | LSCRASENIYSFLAWYQQKP |
| | GQAPRLLIYNSKTFAEGIPD |
| | RFSGSGSGTDFTLTISRLEP |
| | EDFAVYYCQHHYGTPPWT |
| | FGQGTKVEIK |
| | (SEQ ID NO: 1046) |
| 7C5V2-28 | DIVMTQSPLSLPVTPGEPAS |
| | ISCRASENIYSFLAWYLQKP |
| | GQSPQLLIYNSKTFAEGVPD |
| | RFSGSGSGTDFTLKISRVEA |
| | EDVGVYYCQHHYGTPPWT |
| | FGQGTKVEIK |
| | (SEQ ID NO: 1047) |
| 7C5V2-30 | DVVMTQSPLSLPVTLGQPAS |
| | ISCRASENIYSFLAWFQQRP |
| | GQSPRRLIYNSKTFAEGVPD |
| | RFSGSGSGTDFTLKISRVEA |
| | EDVGVYYCQHHYGTPPWTFG |
| | QGTKVEIK |
| | (SEQ ID NO: 1048) |
| 7C5V4-1 | DIVMTQSPDSLAVSLGERAT |
| | INCRASENIYSFLAWYQQKP |
| | GQPPKLLIYNSKTFAEGVPD |
| | RFSGSGSGTDFTLTISSLQA |
| | EDVAVYYCQHHYGTPPWTFG |
| | QGTKVEIK |
| | (SEQ ID NO: 1049) |
| Antibody 6G12 | Antibody 6G12 |
| 6G12V4-1 | DIVMTQSPDSLAVSLGERATI |
| | NCKSSQSLLYSSNQKNCLAW |
| | YQQKPGQPPKLLIYWAFTRE |
| | SGVPDRFSGSGSGTDFTLTI |
| | SSLQAEDVAVYYCQQYYSYP |
| | LTFGQGTKVEIK |
| | (SEQ ID NO: 1051) |
| 6G12V2-30 | DVVMTQSPLSLPVTLGQPAS |
| | ISCKSSQSLLYSSNQKNCLA |
| | WFQQRPGQSPRRLIYWAFTR |
| | ESGVPDRFSGSGSGTDFTLK |
| | ISRVEAEDVGVYYCQQYYSY |
| | PLTFGQGTKVEIK |
| | (SEQ ID NO: 1052) |
| 6G12V2-28 | DIVMTQSPLSLPVTPGEPAS |
| | ISCKSSQSLLYSSNQKNCLA |
| | WYLQKPGQSPQLLIYWAFTR |
| | ESGVPDRFSGSGSGTDFTLK |
| | ISRVEAEDVGVYYCQQYYSY |
| | PLTFGQGTKVEIK |
| | (SEQ ID NO: 1053) |
| 6G12V1-9 | DIQLTQSPSFLSASVGDRVT |
| | ITCKSSQSLLYSSNQKNCLA |
| | WYQQKPGKAPKLLIYWAFTR |
| | ESGVPSRFSGSGSGTEFTLT |
| | ISSLQPEDFATYYCQQYYSY |
| | PLTFGQGTKVEIK |
| | (SEQ ID NO: 1054) |
| 6G12V1-5 | DIQMTQSPSTLSASVGDRVT |
| | ITCKSSQSLLYSSNQKNCLA |
| | WYQQKPGKAPKLLIYWAFTR |
| | ESGVPSRFSGSGSGTEFTLT |
| | ISSLQPDDFATYYCQQYYSY |
| | PLTFGQGTKVEIK |
| | (SEQ ID NO: 1055) |
| 6G12V3-15 | EIVMTQSPATLSVSPGERAT |
| | LSCKSSQSLLYSSNQKNCLA |
| | WYQQKPGQAPRLLIYWAFTR |
| | ESGIPARFSGSGSGTEFTLT |
| | ISSLQSEDFAVYYCQQYYSY |
| | PLTFGQGTKVEIK |
| | (SEQ ID NO: 1056) |
| 6G12V1-33 | DIQMTQSPSSLSASVGDRVT |
| | ITCKSSQSLLYSSNQKNCLA |
| | WYQQKPGKAPKLLIYWAFTR |
| | ESGVPSRFSGSGSGTDFTFT |
| | ISSLQPEDIATYYCQQYYSY |
| | PLTFGQGTKVEIK |
| | (SEQ ID NO: 1057) |
| 6G12V1-39 | DIQMTQSPSSLSASVGDRVT |
| | ITCKSSQSLLYSSNQKNCLA |
| | WYQQKPGKAPKLLIYWAFTR |
| | ESGVPSRFSGSGSGTDFTLT |
| | ISSLQPEDFATYYCQQYYSY |
| | PLTFGQGTKVEIK |
| | (SEQ ID NO: 1058) |
| 6G12V3-11 | EIVLTQSPATLSLSPGERAT |
| | LSCKSSQSLLYSSNQKNCLA |
| | WYQQKPGQAPRLLIYWAFTR |
| | ESGIPARFSGSGSGTDFTLT |
| | ISSLEPEDFAVYYCQQYYSY |
| | PLTFGQGTKVEIK |
| | (SEQ ID NO: 1059) |
| 6G12V3-20 | EIVLTQSPGTLSLSPGERAT |
| | LSCKSSQSLLYSSNQKNCLA |
| | WYQQKPGQAPRLLIYWAFTR |
| | ESGIPDRFSGSGSGTDFTLT |
| | ISRLEPEDFAVYYCQQYYSY |
| | PLTFGQGTKVEIK |
| | (SEQ ID NO: 1060) |
| Antibody 8F11 | Antibody 8F11 |
| 8F11V2-30 | DVVMTQSPLSLPVTLGQPAS |
| | ISCKSSQSLLYSNGKTFLSW |
| | FQQRPGQSPRRLIYLVSKLD |
| | SGVPDRFSGSGSGTDFTLKI |
| | SRVEAEDVGVYYCMQGTIIF |
| | PLTFGQGTKVEIK |
| | (SEQ ID NO: 1062) |
| 8F11V2-28 | DIVMTQSPLSLPVTPGEPAS |
| | ISCKSSQSLLYSNGKTFLSW |
| | YLQKPGQSPQLLIYLVSKLD |
| | SGVPDRFSGSGSGTDFTLKI |
| | SRVEAEDVGVYYCMQGTHFP |
| | LTFGQGTKVEIK |
| | (SEQ ID NO: 1063) |
| 8F11V4-1 | DIVMTQSPDSLAVSLGERAT |
| | INCKSSQSLLYSNGKTFLSW |
| | YQQKPGQPPKLLIYLVSKLD |
| | SGVPDRFSGSGSGTDFTLTI |
| | SSLQAEDVAVYYCMQGTHFP |
| | LTFGQGTKVEIK |
| | (SEQ ID NO: 1064) |
| 8F11V1-5 | DIQMTQSPSTLSASVGDRVT |
| | ITCKSSQSLLYSNGKTFLSW |
| | YQQKPGKAPKLLIYLVSKLD |
| | SGVPSRFSGSGSGTEFTLTI |
| | SSLQPDDFATYYCMQGTHFP |
| | LTFGQGTKVEIK |
| | (SEQ ID NO: 1065) |
| 8F11V1-9 | DIQLTQSPSFLSASVGDRVT |
| | ITCKSSQSLLYSNGKTFLSW |
| | YQQKPGKAPKLLIYLVSKLD |
| | SGVPSRFSGSGSGTEFTLTI |
| | SSLQPEDFATYYQVIQGTHF |
| | PLTFGQGTKVEIK |
| | (SEQ ID NO: 1066) |
| 8F11V1-39 | DIQMTQSPSSLSASVGDRVT |
| | ITCKSSQSLLYSNGKTFLSW |
| | YQQKPGKAPKLLIYLVSKLD |
| | SGVPSRFSGSGSGTDFTLTI |
| | SSLQPEDFATYYCMQGTHFP |
| | LTFGQGTKVEIK |
| | (SEQ ID NO: 1067) |
| 8F11V1-33 | DIQMTQSPSSLSASVGDRVT |
| | ITCKSSQSLLYSNGKTFLSW |
| | YQQKPGKAPKLLIYLVSKLD |
| | SGVPSRFSGSGSGTDFTFTI |
| | SSLQPEDIATYYCMQGTHFP |
| | LTFGQGTKVEIK |
| | (SEQ ID NO: 1068) |
| 8F11V3-15 | EIVMTQSPATLSVSPGERAT |
| | LSCKSSQSLLYSNGKTFLSW |
| | YQQKPGQAPRLLIYLVSKLD |
| | SGIPARFSGSGSGTEFTLTI |
| | SSLQSEDFAVYYCMQGTHFP |
| | LTFGQGTKVEIK |
| | (SEQ ID NO: 1069) |
| 8F11V3-11 | EIVLTQSPATLSLSPGERAT |
| | LSCKSSQSLLYSNGKTFLSW |
| | YQQKPGQAPRLLIYLVSKLD |
| | SGIPARFSGSGSGTDFTLTI |
| | SSLEPEDFAVYYCMQGTHFP |
| | LTFGQGTKVEIK |
| | (SEQ ID NO: 1070) |
| 8F11V3-20 | EIVLTQSPGTLSLSPGERAT |
| | LSCKSSQSLLYSNGKTFLSW |
| | YQQKPGQAPRLLIYLVSKLD |
| | SGEPDRFSGSGSGTDFTLTI |
| | SRLEPEDFAVYYCMQGTHFP |
| | LTFGQGTKVEIK |
| | (SEQ ID NO: 1071) |
| Antibody 8E10 | Antibody 8E10 |
| 8E10V2-30 | DWMTQSPLSLPVTLGQPASI |
| | SCKSSQSLLDSDGKTYLNWF |
| | QQRPGQSPRRLIYLVSKLDS |
| | GVPDRFSGSGSGTDFTLKTS |
| | RVEAEDVGVYYCWQGTHFPY |
| | TFGQGTKVEIK |
| | (SEQ ID NO: 1073) |
| 8E10V2-28 | DIVMTQSPLSLPVTPGEPAS |
| | ISCKSSQSLLDSDGKTYLNW |
| | YLQKPGQSPQLLIYLVSKLD |
| | SGVPDRFSGSGSGTDFTLKI |
| | SRVEAEDVGVYYCWQGTHFP |
| | YTFGQGTKVEIK |
| | (SEQ ID NO: 1074) |
| 8EI0V4-1 | DIVMTQSPDSLAVSLGERAT |
| | INCKSSQSLLDSDGKTYLNW |
| | YQQKPGQPPKLLIYLVSKLD |
| | SGVPDRFSGSGSGTDFTLTI |
| | SSLQAEDVAVYYCWQGTHFP |
| | YTFGQGTKVEIK |
| | (SEQ ID NO: 1075) |
| 8E10V1-9 | DIQLTQSPSFLSASVGDRVT |
| | ITCKSSQSLLDSDGKTYLNW |
| | YQQKPGKAPKLLIYLVSKLD |
| | SGVPSRFSGSGSGTEFTLTI |
| | SSLQPEDFATYYCWQGTHFP |
| | YTFGQGTKVEIK |
| | (SEQ ID NO: 1076) |
| 8E10V1-5 | DIQMTQSPSTLSASVGDRVT |
| | ITCKSSQSLLDSDGKTYLNW |
| | YQQKPGKAPKLLIYLVSKLD |
| | SGVPSRFSGSGSGTEFTLTI |
| | SSLQPDDFATYYCWQGTHFP |
| | YTFGQGTKVETK |
| | (SEQ ID NO: 1077) |
| 8E10V1-39 | DIQMTQSPSSLSASVGDRVT |
| | ITCKSSQSLLDSDGKTYLNW |
| | YQQKPGKAPKLLIYLVSKLD |
| | SGVPSRFSGSGSGTDFTLTI |
| | SSLQPEDFATYYCWQGTHFP |
| | YTFGQGTKVEIK |
| | (SEQ ID NO: 1078) |
| 8E10V1-33 | DIQMTQSPSSLSASVGDRVT |
| | ITCKSSQSLLDSDGKTYLNW |
| | YQQKPGKAPKLLIYLVSKLD |
| | SGVPSRFSGSGSGTDFTFTI |
| | SSLQPEDIATYYCWQGTFIF |
| | PYTFGQGTKVEIK |
| | (SEQ ID NO: 1079) |
| 8E10V3-11 | EIVLTQSPATLSLSPGERAT |
| | LSCKSSQSLLDSDGKTYLNW |
| | YQQKPGQAPRLLIYLVSKLD |
| | SGIPARFSGSGSGTDFTLTI |
| | SSLEPEDFAVYYCWQGTHFP |
| | YTFGQGTKVEIK |
| | (SEQ ID NO: 1080) |
| 8E10V3-15 | EIVMTQSPATLSVSPGERAT |
| | LSCKSSQSLLDSDGKTYLNW |
| | YQQKPGQAPRLLIYLVSKLD |
| | SGIPARFSGSGSGTEFTLTI |
| | SSLQSEDFAVYYCWQGTHFP |
| | YTFGQGTKVEIK |
| | (SEQ ID NO: 1081) |
| 8E10V3-20 | EIVLTQSPGTLSLSPGERAT |
| | LSCKSSQSLLDSDGKTYLNW |
| | YQQKPGQAPRLLIYLVSKLD |
| | SGIPDRFSGSGSGTDFTLTI |
| | SRLEPEDFAVYYCWQGTHFP |
| | YTFGQGTKVEIK |
| | (SEQ ID NO: 1082) |
| Antibody 7E5 | Antibody 7E5 |
| 7E5V2-30 | DVVMTQSPLSLPVTLGQPASI |
| | SCKSSQSLLYSNGKTFLSWF |
| | QQRPGQSPRRLIYLVSKLDS |
| | GVPDRFSGSGSGTDFTLKTS |
| | RVEAEDVGVYYCMQGTHFPL |
| | TFGQGTKVEIK |
| | (SEQ ID NO: 1062) |
| 7E5V2-28 | DIVMTQSPLSLPVTPGEPAS |
| | ISCKSSQSLLYSNGKTFLSW |
| | YLQKPGQSPQLLIYLVSKLD |
| | SGVPDRFSGSGSGTDFTLKI |
| | SRVEAEDVGVYYCMQGTHFP |
| | LTFGQGTKVEIK |
| | (SEQ ID NO: 1063) |
| 7E5V4-1 | DIVMTQSPDSLAVSLGERAT |
| | INCKSSQSLLYSNGKTFLSW |
| | YQQKPGQPPKLLIYLVSKLD |
| | SGVPDRFSGSGSGTDFTLTI |
| | SSLQAEDVAVYYCMQGTHFP |
| | LTFGQGTKVEIK |
| | (SEQ ID NO: 1064) |
| 7E5V1-5 | DIQMTQSPSTLSASVGDRVT |
| | ITCKSSQSLLYSNGKTFLSW |
| | YQQKPGKAPKLLIYLVSKLD |
| | SGVPSRFSGSGSGTEFTLTT |
| | SSLQPDDFATYYCMQGTHFP |
| | LTFGQGTKVEIK |
| | (SEQ ID NO: 1065) |
| 7E5V1-9 | DIQLTQSPSFLSASVGDRVT |
| | ITCKSSQSLLYSNGKTFLSW |
| | YQQKPGKAPKLLIYLVSKLD |
| | SGVPSRFSGSGSGTEFTLTI |
| | SSLQPEDFATYYCMQGTHFP |
| | LTFGQGTKVEIK |
| | (SEQ ID NO: 1066) |
| 7E5V1-39 | DIQMTQSPSSLSASVGDRVT |
| | ITCKSSQSLLYSNGKTFLSW |
| | YQQKPGKAPKLLIYLVSKLD |
| | SGVPSRFSGSGSGTDFTLTI |
| | SSLQPEDFATYYCMQGTHFP |
| | LTFGQGTKVEIK |
| | (SEQ ID NO: 1067) |
| 7E5V1-33 | DIQMTQSPSSLSASVGDRVT |
| | ITCKSSQSLLYSNGKTFLSW |
| | YQQKPGKAPKLLIYLVSKLD |
| | SGVPSRFSGSGSGTDFTFTI |
| | SSLQPEDIATYYCMQGTHFP |
| | LTFGQGTKVEIK |
| | (SEQ ID NO: 1068) |
| 7E5V3-15 | EIVMTQSPATLSVSPGERAT |
| | LSCKSSQSLLYSNGKTFLSW |
| | YQQKPGQAPRLLIYLVSKLD |
| | SGIPARFSGSGSGTEFTLTI |
| | SSLQSEDFAVYYCMQGTHFP |
| | LTFGQGTKVEIK |
| | (SEQ ID NO: 1069) |
| 7E5V3-11 | EIVLTQSPATLSLSPGERAT |
| | LSCKSSQSLLYSNGKTFLSW |
| | YQQKPGQAPRLLIYLVSKLD |
| | SGIPARFSGSGSGTDFTLTI |
| | SSLEPEDFAVYYCMQGTHFP |
| | LTFGQGTKVEIK |
| | (SEQ ID NO: 1070) |
| 7E5V3-20 | EIVLTQSPGTLSLSPGERAT |
| | LSCKSSQSLLYSNGKTFLSW |
| | YQQKPGQAPRLLIYLVSKLD |
| | SGIPDRFSGSGSGTDFTLTI |
| | SRLEPEDFAVYYCMQGTHFP |
| | LTFGQGTKVEIK |
| | (SEQ ID NO: 1071) |
| Antibody 7F8 | Antibody 7F8 |
| 7F8V3-11 | EIVLTQSPATLSLSPGERAT |
| | LSCSASSSVSYMYWYQQKPG |
| | QAPRLLIYLTSILASGIPAR |
| | FSGSGSGTDFTLTISSLEPE |
| | DFAVYYCQQWSFNPYTFGQG |
| | TKVEIK |
| | (SEQ ID NO: 1084) |
| 7F8V1-39 | DIQMTQSPSSLSASVGDRVT |
| | ITCSASSSVSYMYWYQQKPG |
| | KAPKLLIYLTSILASGVPSR |
| | FSGSGSGTDFTLTISSLQPE |
| | DFATYYCQQWSFNPYTFGQG |
| | TKVEIK |
| | (SEQ ID NO: 1085) |
| 7F8VI-5 | DIQMTQSPSTLSASVGDRVT |
| | ITCSASSSVSYMYWYQQKPG |
| | KAPKLLIYLTSILASGVPSR |
| | FSGSGSGTEFTLTISSLQPD |
| | DFATYYCQQWSFNPYTFGQG |
| | TKVEIK |
| | (SEQ ID NO: 1086) |
| 7F8V3-15 | EIVMTQSPATLSVSPGERAT |
| | LSCSASSSVSYMYWYQQKPG |
| | QAPRLLIYLTSILASGIPAR |
| | FSGSGSGTEFTLTISSLQSE |
| | DFAVYYCQQWSFNPYTFGQG |
| | TKVEIK |
| | (SEQ ID NO: 1087) |
| 7F8V1-9 | DIQLTQSPSFLSASVGDRVT |
| | ITCSASSSVSYMYWYQQKPG |
| | KAPKLLIYLTSILASGVPSR |
| | FSGSGSGTEFTLTISSLQPE |
| | DFATYYCQQWSFNPYTFGQG |
| | TKVEIK |
| | (SEQ ID NO: 1088) |
| 7F8VI-33 | DIQMTQSPSSLSASVGDRVT |
| | ITCSASSSVSYMYWYQQKPG |
| | KAPKLLIYLTSILASGVPSR |
| | FSGSGSGTDFTFTISSLQPE |
| | DIATYYCQQWSFNPYTFGQG |
| | TKVEIK |
| | (SEQ ID NO: 1089) |
| 7F8V3-20 | EIVLTQSPGTLSLSPGERAT |
| | LSCSASSSVSYMYWYQQKPG |
| | QAPRLLIYLTSILASGIPDR |
| | FSGSGSGTDFTLTISRLEPE |
| | DFAVYYCQQWSFNPYTFGQG |
| | TKVEIK |
| | (SEQ ID NO: 1090) |
| 7F8V2-28 | DIVMTQSPLSLPVTPGEPAS |
| | ISCSASSSVSYMYWYLQKPG |
| | QSPQLLIYLTSILASGVPDR |
| | FSGSGSGTDFTLKISRVEAE |
| | DVGVYYCQQWSFNPYTFGQG |
| | TKVEIK |
| | (SEQ ID NO: 1091) |
| 7F8V2-30 | DVVMTQSPLSLPVTLGQPASI |
| | SCSASSSVSYMYWFQQRPGQ |
| | SPRRLIYLTSILASGVPDRF |
| | SGSGSGTDFTLKISRVEAED |
| | VGVYYCQQWSFNPYTFGQGT |
| | KVE1K |
| | (SEQ ID NO: 1092) |
| 7F8V4-1 | DIVMTQSPDSLAVSLGERAT |
| | INCSASSSVSYMYWYQQKPG |
| | QPPKLLIYLTSILASGVPDR |
| | FSGSGSGTDFTLTISSLQAE |
| | DVAVYYCQQWSFNPYTFGQG |
| | TKVEIK |
| | (SEQ ID NO: 1093) |
| Antibody 8F8 | Antibody 8F8 |
| 8F8V2-30 | DVVMTQSPLSLPVTLGQPAS |
| | ISCRSSQSLVHSNGNTYLHW |
| | FQQRPGQSPRRLIYKVSNRF |
| | SGVPDRFSGSGSGTDFTLKI |
| | SRVEAEDVGVYYCSQSTHVP |
| | LTFGQGTKVEIK |
| | (SEQ ID NO: 1095) |
| 8F8V2-28 | DIVMTQSPLSLPVTPGEPAS |
| | ISCRSSQSLVHSNGNTYLHW |
| | YLQKPGQSPQLLIYKVSNRF |
| | SGVPDRFSGSGSGTDFTLKI |
| | SRVEAEDVGVYYCSQSTHVP |
| | LTFGQGTKVEIK |
| | (SEQ ID NO: 10%) |
| 8F8V4-1 | DIVMTQSPDSLAVSLGERATI |
| | NCRSSQSLVHSNGNTYLHWY |
| | QQKPGQPPKLLIYKVSNRFS |
| | GVPDRFSGSGSGTDFTLTIS |
| | SLQAEDVAVYYCSQSTHVPL |
| | TFGQGTKVEIK |
| | (SEQ ID NO: 1097) |
| 8F8V3-11 | EIVLTQSPATLSLSPGERAT |
| | LSCRSSQSLVIISNGNTYLI |
| | IWYQQKPGQAPRLLIYKVSN |
| | RFSGIPARFSGSGSGTDFTL |
| | TISSLEPEDFAVYYCSQSTH |
| | VPLTFGQGTKVEIK |
| | (SEQ ID NO: 1098) |
| 8F8V1-39 | DIQMTQSPSSLSASVGDRVT |
| | ITCRSSQSLVHSNGNTYLHW |
| | YQQKPGKAPKLLIYKVSNRF |
| | SGVPSRFSGSGSGTDFTLTI |
| | SSLQPEDFATYYCSQSTHV |
| | PLTFGQGTKVEIK |
| | (SEQ ID NO: 1099) |
| 8F8V1-33 | DIQMTQSPSSLSASVGDRVT |
| | ITCRSSQSLVHSNGNTYLHW |
| | YQQKPGKAPKLLIYKVSNRF |
| | SGVPSRFSGSGSGTDFTFTI |
| | SSLQPEDIATYYCSQSTHVP |
| | LTFGQGTKVEIK |
| | (SEQ ID NO: 1100) |
| 8F8V3-15 | EIVMTQSPATLSVSPGERAT |
| | LSCRSSQSLVHSNGNTYLHW |
| | YQQKPGQAPRLLIYKVSNRF |
| | SGIPARFSGSGSGTEFTLTI |
| | SSLQSEDFAVYYCSQSTHVP |
| | LTFGQGTKVEIK |
| | (SEQ ID NO: 1101) |
| 8F8V1-5 | DIQMTQSPSTLSASVGDRVT |
| | ITCRSSQSLVHSNGNTYLHW |
| | YQQKPGKAPKLLIYKVSNRF |
| | SGVPSRFSGSGSGTEFTLTI |
| | SSLQPDDFATYYCSQSTHVP |
| | LTFGQGTKVEIK |
| | (SEQ ID NO: 1102) |
| 8F8V1-9 | DIQLTQSPSFLSASVGDRVT |
| | ITCRSSQSLVHSNGNTYLHW |
| | YQQKPGKAPKLLIYKVSNRF |
| | SGVPSRFSGSGSGTEFTLTI |
| | SSLQPEDFATYYCSQSTHVP |
| | LTFGQGTKVEIK |
| | (SEQ ID NO: 1103) |
| 8F8V3-20 | EIVLTQSPGTLSLSPGERAT |
| | LSCRSSQSLVHSNGNTYLHW |
| | YQQKPGQAPRLLIYKVSNRF |
| | SGIPDRFSGSGSGTDFTLTI |
| | SRLEPEDFAVYYCSQSTHVP |
| | LTFGQGTKVEIK |
| | (SEQ ID NO: 1104) |
| Antibody 1H7 | Antibody 1H7 |
| 1H7V1-39 | DIQMTQSPSSLSASVGDRVT |
| | ITCSASSSVSYMYWYQQKPG |
| | KAPKLLIYLTSILASGVPSR |
| | FSGSGSGTDFTLTISSLQPE |
| | DFATYYCQQWSFNPYTFGQG |
| | TKVEIK |
| | (SEQ ID NO: 1085) |
| 1H7V3-11 | EIVLTQSPATLSLSPGERAT |
| | LSCSASSSVSYMYWYQQKPG |
| | QAPRLLIYLTSILASGIPAR |
| | FSGSGSGTDFTLTISSLEPE |
| | DFAVYYCQQWSFNPYTFGQG |
| | TKVEIK |
| | (SEQ ID NO: 1084) |
| 1H7V1-5 | DIQMTQSPSTLSASVGDRVT |
| | ITCSASSSVSYMYWYQQKPG |
| | KAPKLLIYLTSILASGVPSR |
| | FSGSGSGTEFTLTISSLQPD |
| | DFATYYCQQWSFNPYTFGQG |
| | TKVEIK |
| | (SEQ ID NO: 1086) |
| 1H7V1-9 | DIQLTQSPSFLSASVGDRVT |
| | ITCSASSSVSYMYWYQQKPG |
| | KAPKLLIYLTSILASGVPSR |
| | FSGSGSGTEFTLTISSLQPE |
| | DFATYYCQQWSFNPYTFGQG |
| | TKVEIK |
| | (SEQ ID NO: 1088) |
| 1H7V3-15 | EIVMTQSPATLSVSPGERAT |
| | LSCSASSSVSYMYWYQQKPG |
| | QAPRLLIYLTSILASGIPAR |
| | FSGSGSGTEFTLTISSLQSE |
| | DFAVYYCQQWSFNPYTFGQG |
| | TKVEIK |
| | (SEQ ID NO: 1087) |
| 1H7V1-33 | DIQMTQSPSSLSASVGDRVT |
| | ITCSASSSVSYMYWYQQKPG |
| | KAPKLLIYLTSILASGVPSR |
| | FSGSGSGTDFTFTISSLQPE |
| | DIATYYCQQWSFNPYTFGQG |
| | TKVEIK |
| | (SEQ ID NO: 1089) |
| 1H7V3-20 | EIVLTQSPGTLSLSPGERAT |
| | LSCSASSSVSYMYWYQQKPG |
| | QAPRLLIYLTSILASGIPDR |
| | FSGSGSGTDFTLTISRLEPE |
| | DFAVYYCQQWSFNPYTFGQG |
| | TKVEIK |
| | (SEQ ID NO: 1090) |
| 1H7V2-28 | DIVMTQSPLSLPVTPGEPAS |
| | ISCSASSSVSYMYWYLQKPG |
| | QSPQLLIYLTSILASGVPDR |
| | FSGSGSGTDFTLKISRVEAE |
| | DVGVYYCQQWSFNPYTFGQG |
| | TKVEIK |
| | (SEQ ID NO: 1091) |
| 1H7V2-30 | DVVMTQSPLSLPVTLGQPASI |
| | SCSASSSVSYMYWFQQRPGQ |
| | SPRRLIYLTSILASGVPDRF |
| | SGSGSGTDFTLKISRVEAED |
| | VGVYYCQQWSFNPYTFGQGT |
| | KVEIK |
| | (SEQ ID NO: 1092) |
| 1H7V4-1 | DIVMTQSPDSLAVSLGERAT |
| | INCSASSSVSYMYWYQQKPG |
| | QPPKLLIYLTSILASGVPDR |
| | FSGSGSGTDFTLTISSLQAE |
| | DVAVYYCQQWSFNPYTFGQG |
| | TKVEIK |
| | (SEQ ID NO: 1093) |
| Antibody 2H8 | Antibody 2H8 |
| 2H8V3-11 | EIVLTQSPATLSLSPGERAT |
| | LSCSASSSVSYMYWYQQKPG |
| | QAPRLLIYLTSILASGIPAR |
| | FSGSGSGTDFTLTISSLEPE |
| | DFAVYYCQQWSFNPYTFGQG |
| | TKVEIK |
| | (SEQ ID NO: 1084) |
| 2H8V1-39 | DIQMTQSPSSLSASVGDRVT |
| | ITCSASSSVSYMYWYQQKPG |
| | KAPKLLIYLTSILASGVPSR |
| | FSGSGSGTDFTLTISSLQPE |
| | DFATYYCQQWSFNPYTFGQG |
| | TKVEIK |
| | (SEQ ID NO: 1085) |
| 2H8V1-5 | DIQMTQSPSTLSASVGDRVT |
| | ITCSASSSVSYMYWYQQKPG |
| | KAPKLLIYLTSILASGVPSR |
| | FSGSGSGTEFTLTISSLQPD |
| | DFATYYCQQWSFNPYTFGQG |
| | TKVEIK |
| | (SEQ ID NO: 1086) |
| 2H8V3-15 | EIVMTQSPATLSVSPGERAT |
| | LSCSASSSVSYMYWYQQKPG |
| | QAPRLLIYLTSILASGIPAR |
| | FSGSGSGTEFTLTISSLQSE |
| | DFAVYYCQQWSFNPYTFGQG |
| | TKVEIK |
| | (SEQ ID NO: 1087) |
| 2H8V1-9 | DIQLTQSPSFLSASVGDRVT |
| | ITCSASSSVSYMYWYQQKPG |
| | KAPKLLIYLTSILASGVPSR |
| | FSGSGSGTEFTLTISSLQPE |
| | DFATYYCQQWSFNPYTFGQG |
| | TKVEIK |
| | (SEQ ID NO: 1088) |
| 2H8V1-33 | DIQMTQSPSSLSASVGDRVT |
| | ITCSASSSVSYMYWYQQKPG |
| | KAPKLLIYLTSILASGVPSR |
| | FSGSGSGTDFTFTISSLQPE |
| | DIATYYCQQWSFNPYTFGQG |
| | TKVEIK |
| | (SEQ ID NO: 1089) |
| 2H8V3-20 | EIVLTQSPGTLSLSPGERAT |
| | LSCSASSSVSYMYWYQQKPG |
| | QAPRLLIYLTSILASGIPDR |
| | FSGSGSGTDFTLTISRLEPE |
| | DFAVYYCQQWSFNPYTFGQG |
| | TKVEIK |
| | (SEQ ID NO: 1090) |
| 2H8V2-28 | DIVMTQSPLSLPVTPGEPAS |
| | ISCSASSSVSYMYWYLQKPG |
| | QSPQLLIYLTSILASGVPDR |
| | FSGSGSGTDFTLKISRVEAE |
| | DVGVYYCQQWSFNPYTFGQG |
| | TKVEIK |
| | (SEQ ID NO: 1091) |
| 2H8V2-30 | DVVMTQSPLSLPVTLGQPASI |
| | SCSASSSVSYMYWFQQRPGQ |
| | SPRRLIYLTSILASGVPDRF |
| | SGSGSGTDFTLKISRVEAED |
| | VGVYYCQQWSFNPYTFGQGT |
| | KVEIK |
| | (SEQ ID NO: 1092) |
| 2H8V4-1 | DIVMTQSPDSLAVSLGERAT |
| | INCSASSSVSYMYWYQQKPG |
| | QPPKLLIYLTSILASGVPDR |
| | FSGSGSGTDFTLTISSLQAE |
| | DVAVYYCQQWSFNPYTFGQG |
| | TKVEIK |
| | (SEQ ID NO: 1093) |
| Antibody 3A2 | Antibody 3A2 |
| 3A2 V2-30 | DVVMTQSPLSLPVTLGQPAS |
| | ISCRSSQTIIHSNGNTYLEW |
| | FQQRPGQSPRRLIYKVSNRF |
| | SGVPDRFSGSGSGTDFTLKI |
| | SRVEAEDVGVYYCFQGSHVP |
| | YTFGQGTKVEIK |
| | (SEQ ID NO: 1108) |
| 3A2 V2-28 | DIVMTQSPLSLPVTPGEPAS |
| | ISCRSSQTIIHSNGNTYLEW |
| | YLQKPGQSPQLLIYKVSNRF |
| | SGVPDRFSGSGSGTDFTLKI |
| | SRVEAEDVGVYYCFQGSHVP |
| | YTFGQGTKVEIK |
| | (SEQ ID NO: 1109) |
| 3A2 V4-1 | DIVMTQSPDSLAVSLGERAT |
| | INCRSSQTIIHSNGNTYLEW |
| | YQQKPGQPPKLLIYKVSNRF |
| | SGVPDRFSGSGSGTDFTLTI |
| | SSLQAEDVAVYYCFQGSHVP |
| | YTFGQGTKVEIK |
| | (SEQ ID NO: 1110) |
| 3A2 V3-11 | EIVLTQSPATLSLSPGERAT |
| | LSCRSSQTIIHSNGNTYLEW |
| | YQQKPGQAPRLLIYKVSNRF |
| | SGIPARFSGSGSGTDFTLTI |
| | SSLEPEDFAVYYCFQGSHVP |
| | YTFGQGTKVEIK |
| | (SEQ ID NO: 1111) |
| 3A2 I-9 | DIQLTQSPSFLSASVGDRVT |
| | ITCRSSQTIIHSNGNTYLEW |
| | YQQKPGKAPKLLIYKVSNRF |
| | SGVPSRFSGSGSGTEFTLTI |
| | SSLQPEDFATYYCFQGSHVP |
| | YTFGQGTKVEIK |
| | (SEQ ID NO: 1112) |
| 3A2 I-33 | DIQMTQSPSSLSASVGDRVT |
| | ITCRSSQTIIHSNGNTYLEW |
| | YQQKPGKAPKLLIYKVSNRF |
| | SGVPSRFSGSGSGTDFTFTI |
| | SSLQPEDIATYYCFQGSHVP |
| | YTFGQGTKVEIK |
| | (SEQ ID NO: 1113) |
| 3A2 VI-39 | DIQMTQSPSSLSASVGDRVT |
| | ITCRSSQTIIHSNGNTYLEW |
| | YQQKPGKAPKLLIYKVSNRF |
| | SGVPSRFSGSGSGTDFTLTI |
| | SSLQPEDFATYYCFQGSHVP |
| | YTFGQGTKVEIK |
| | (SEQ ID NO: 1114) |
| 3A2 V3-15 | EIVMTQSPATLSVSPGERAT |
| | LSCRSSQTIIHSNGNTYLEW |
| | YQQKPGQAPRLLIYKVSNRF |
| | SGIPARFSGSGSGTEFTLTI |
| | SSLQSEDFAVYYCFQGSHVP |
| | YTFGQGTKVEIK |
| | (SEQ ID NO: 1115) |
| 3A2 VI-5 | DIQMTQSPSTLSASVGDRVT |
| | ITCRSSQTIIHSNGNTYLEW |
| | YQQKPGKAPKLLIYKVSNRF |
| | SGVPSRFSGSGSGTEFTLTI |
| | SSLQPDDFATYYCFQGSHVP |
| | YTFGQGTKVEIK |
| | (SEQ ID NO: 1116) |
| 3A2 V3-20 | EIVLTQSPGTLSLSPGERAT |
| | LSCRSSQTIIHSNGNTYLEW |
| | YQQKPGQAPRLLIYKVSNRF |
| | SGIPDRFSGSGSGTDFTLTI |
| | SRLEPEDFAVYYCFQGSHVP |
| | YTFGQGTKVEK |
| | (SEQ ID NO: 1117) |
| Antibody 3A7 | Antibody 3A7 |
| 3A7 V2-30 | DVVMTQSPLSLPVTLGQPAS |
| | ISCKSSQSLLYSNGKTFLSW |
| | FQQRPGQSPRRLIYLVSKLD |
| | SGVPDRFSGSGSGTDFTLKI |
| | SRVEAEDVGVYYCMQGTHFP |
| | LTFGQGTKVEIK |
| | (SEQ ID NO: 1062) |
| 3A7 V2-28 | DIVMTQSPLSLPVTPGEPAS |
| | ISCKSSQSLLYSNGKTFLSW |
| | YLQKPGQSPQLLIYLVSKLD |
| | SGVPDRFSGSGSGTDFTLKI |
| | SRVEAEDVGVYYCMQGTHFP |
| | LTFGQGTKVEIK |
| | (SEQ ID NO: 1063) |
| 3A7 V4-1 | DIVMTQSPDSLAVSLGERAT |
| | INCKSSQSLLYSNGKTFLSW |
| | YQQKPGQPPKLLIYLVSKLD |
| | SGVPDRFSGSGSGTDFTLTI |
| | SSLQAEDVAVYYCMQGTHFP |
| | LTFGQGTKVEIK |
| | (SEQ ID NO: 1064) |
| 3A7 VI-39 | DIQMTQSPSSLSASVGDRVT |
| | ITCKSSQSLLYSNGKTFLSW |
| | YQQKPGKAPKLLIYLVSKLD |
| | SGVPSRFSGSGSGTDFTLTI |
| | SSLQPEDFATYYCMQGTHFP |
| | LTFGQGTKVEIK |
| | (SEQ ID NO: 1067) |
| 3A7 I-9 | DIQLTQSPSFLSASVGDRVT |
| | ITCKSSQSLLYSNGKTFLSW |
| | YQQKPGKAPKLLIYLVSKLD |
| | SGVPSRFSGSGSGTEFTLTI |
| | SSLQPEDFATYYCMQGTHFP |
| | LTFGQGTKVEIK |
| | (SEQ ID NO: 1066) |
| 3A7 I-5 | DIQMTQSPSTLSASVGDRVT |
| | ITCKSSQSLLYSNGKTFLSW |
| | YQQKPGKAPKLLIYLVSKLD |
| | SGVPSRFSGSGSGTEFTLTI |
| | SSLQPDDFATYYCMQGTHFP |
| | LTFGQGTKVEIK |
| | (SEQ ID NO: 1065) |
| 3A7 VI-33 | DIQMTQSPSSLSASVGDRVT |
| | ITCKSSQSLLYSNGKTFLSW |
| | YQQKPGKAPKLLIYLVSKLD |
| | SGVPSRFSGSGSGTDFTFTI |
| | SSLQPEDIATYYCMQGTHFP |
| | LTFGQGTKVEIK |
| | (SEQ ID NO: 1068) |
| 3A7 V3-15 | EIVMTQSPATLSVSPGERAT |
| | LSCKSSQSLLYSNGKTFLSW |
| | YQQKPGQAPRLLIYLVSKLD |
| | SGIPARFSGSGSGTEFTLTI |
| | SSLQSEDFAVYYCMQGTHFP |
| | LTFGQGTKVEIK |
| | (SEQ ID NO: 1069) |
| 3A7 V3-11 | EIVLTQSPATLSLSPGERAT |
| | LSCKSSQSLLYSNGKTFLSW |
| | YQQKPGQAPRLLIYLVSKLD |
| | SGIPARFSGSGSGTDFTLTI |
| | SSLEPEDFAVYYCMQGTHFP |
| | LTFGQGTKVEIK |
| | (SEQ ID NO: 1070) |
| 3A7 V3-20 | EIVLTQSPGTLSLSPGERAT |
| | LSCKSSQSLLYSNGKTFLSW |
| | YQQKPGQAPRLLIYLVSKLD |
| | SGIPDRFSGSGSGTDFTLTI |
| | SRLEPEDFAVYYCMQGTHFP |
| | LTFGQGTKVEIK |
| | (SEQ ID NO: 1071) |
| Antibody 3B10 | Antibody 3B10 |
| 3B10V4-1 | DIVMTQSPDSLAVSLGERAT |
| | INCKSSQSLLYSSDQKNYLA |
| | WYQQKPGQPPKLLIYWASTR |
| | ESGVPDRFSGSGSGTDFTLT |
| | ISSLQAEDVAVYYCQQYYSY |
| | PLTFGQGTKVEIK |
| | (SEQ ID NO: 1120) |
| 3B10V2-28 | DIVMTQSPLSLPVTPGEPAS |
| | ISCKSSQSLLYSSDQKNYLA |
| | WYLQKPGQSPQLLIYWASTR |
| | ESGVPDRFSGSGSGTDFTLK |
| | ISRVEAEDVGVYYCQQYYSY |
| | PLTFGQGTKVEIK |
| | (SEQ ID NO: 1121) |
| 3B10V2-30 | DVVMTQSPLSLPVTLGQPAS |
| | ISCKSSQSLLYSSDQKNYLA |
| | WFQQRPGQSPRRLIYWASTR |
| | ESGVPDRFSGSGSGTDFTLK |
| | ISRVEAEDVGVYYCQQYYSY |
| | PLTFGQGTKVEIK |
| | (SEQ ID NO: 1122) |
| 3BI0V1-5 | DIQMTQSPSTLSASVGDRVT |
| | ITCKSSQSLLYSSDQKNYLA |
| | WYQQKPGKAPKLLIYWASTR |
| | ESGVPSRFSGSGSGTEFTLT |
| | ISSLQPDDFATYYCQQYYSY |
| | PLTFGQGTKVEIK |
| | (SEQ ID NO: 1123) |
| 3B10V1-9 | DIQLTQSPSFLSASVGDRVT |
| | ITCKSSQSLLYSSDQKNYLA |
| | WYQQKPGKAPKLLIYWASTR |
| | ESGVPSRFSGSGSGTEFTLT |
| | ISSLQPEDFATYYCQQYYSY |
| | PLTFGQGTKVEIK |
| | (SEQ ID NO: 1124) |
| 3B10V3-15 | EIVMTQSPATLSVSPGERAT |
| | LSCKSSQSLLYSSDQKNYLA |
| | WYQQKPGQAPRLLIYWASTR |
| | ESGIPARFSGSGSGTEFTLT |
| | ISSLQSEDFAVYYCQQYYSY |
| | PLTFGQGTKVEIK |
| | (SEQ ID NO: 1125) |
| 3B10V1-39 | DIQMTQSPSSLSASVGDRVT |
| | ITCKSSQSLLYSSDQKNYLA |
| | WYQQKPGKAPKLLIYWASTR |
| | ESGVPSRFSGSGSGTDFTLT |
| | ISSLQPEDFATYYCQQYYSY |
| | PLTFGQGTKVEIK |
| | (SEQ ID NO: 1126) |
| 3B10V3-11 | EIVLTQSPATLSLSPGERAT |
| | LSCKSSQSLLYSSDQKNYLA |
| | WYQQKPGQAPRLLIYWASTR |
| | ESGIPARFSGSGSGTDFTLT |
| | ISSLEPEDFAVYYCQQYYSY |
| | PLTFGQGTKVEIK |
| | (SEQ ID NO: 1127) |
| 3B10V1-33 | DIQMTQSPSSLSASVGDRVT |
| | ITCKSSQSLLYSSDQKNYLA |
| | WYQQKPGKAPKLLIYWASTR |
| | ESGVPSRFSGSGSGTDFTFT |
| | ISSLQPEDIATYYCQQYYSY |
| | PLTFGQGTKVEIK |
| | (SEQ ID NO: 1128) |
| 3B10V3-20 | EIVLTQSPGTLSLSPGERAT |
| | LSCKSSQSLLYSSDQKNYLA |
| | WYQQKPGQAPRLLIYWASTR |
| | ESGIPDRFSGSGSGTDFTLT |
| | ISRLEPEDFAVYYCQQYYSY |
| | PLTFGQGTKVEIK |
| | (SEQ ID NO: 1129) |
| Antibody 4F11 | Antibody 4F11 |
| 4F11V2-30 | DVVMTQSPLSLPVTLGQPAS |
| | ISCRSSQTIIHSNGNTYLEW |
| | FQQRPGQSPRRLIYKVSNRF |
| | SGVPDRFSGSGSGTDFTLKI |
| | SRVEAEDVGVYYCFQGSHVP |
| | YTFGQGTKVEIK |
| | (SEQ ID NO: 1108) |
| 4F11V2-28 | DIVMTQSPLSLPVTPGEPAS |
| | ISCRSSQTIIHSNGNTYLEW |
| | YLQKPGQSPQLLIYKVSNRF |
| | SGVPDRFSGSGSGTDFTLKI |
| | SRVEAEDVGVYYCFQGSHVP |
| | YTFGQGTKVEIK |
| | (SEQ ID NO: 1109) |
| 4F11V4-1 | DIVMTQSPDSLAVSLGERAT |
| | INCRSSQTIIHSNGNTYLEW |
| | YQQKPGQPPKLLIYKVSNRF |
| | SGVPDRFSGSGSGTDFTLTI |
| | SSLQAEDVAVYYCFQGSHVP |
| | YTFGQGTKVEIK |
| | (SEQ ID NO: 1110) |
| 4F11V3-11 | EIVLTQSPATLSLSPGERAT |
| | LSCRSSQTIIHSNGNTYLEW |
| | YQQKPGQAPRLLIYKVSNRF |
| | SGIPARFSGSGSGTDFTLTI |
| | SSLEPEDFAVYYCFQGSHVP |
| | YTFGQGTKVEIK |
| | (SEQ ID NO: 1111) |
| 4F11V3-15 | EIVMTQSPATLSVSPGERAT |
| | LSCRSSQTIIHSNGNTYLEW |
| | YQQKPGQAPRLLIYKVSNRF |
| | SGIPARFSGSGSGTEFTLTI |
| | SSLQSEDFAVYYCFQGSHVP |
| | YTFGQGTKVEIK |
| | (SEQ ID NO: 1115) |
| 4F11V1-33 | DIQMTQSPSSLSASVGDRVT |
| | ITCRSSQTIIHSNGNTYLEW |
| | YQQKPGKAPKLLIYKVSNRF |
| | SGVPSRFSGSGSGTDFTFTI |
| | SSLQPEDIATYYCFQGSHVP |
| | YTFGQGTKVEIK |
| | (SEQ ID NO: 1113) |
| 4F11V1-39 | DIQMTQSPSSLSASVGDRVT |
| | ITCRSSQTIIHSNGNTYLEW |
| | YQQKPGKAPKLLIYKVSNRF |
| | SGVPSRFSGSGSGTDFTLTI |
| | SSLQPEDFATYYCFQGSHVP |
| | YTFGQGTKVEIK |
| | (SEQ ID NO: 1114) |
| 4F11V1-9 | DIQLTQSPSFLSASVGDRVT |
| | ITCRSSQTIIHSNGNTYLEW |
| | YQQKPGKAPKLLIYKVSNRF |
| | SGVPSRFSGSGSGTEFTLTI |
| | SSLQPEDFATYYCFQGSHVP |
| | YTFGQGTKVEIK |
| | (SEQ ID NO: 1112) |
| 4F11V1-5 | DIQMTQSPSTLSASVGDRVT |
| | ITCRSSQTIIHSNGNTYLEW |
| | YQQKPGKAPKLLIYKVSNRF |
| | SGVPSRFSGSGSGTEFTLTI |
| | SSLQPDDFATYYCFQGSHVP |
| | YTFGQGTKVEIK |
| | (SEQ ID NO: 1116) |
| 4F11V3-20 | EIVLTQSPGTLSLSPGERAT |
| | LSCRSSQTIIHSNGNTYLEW |
| | YQQKPGQAPRLLIYKVSNRF |
| | SGIPDRFSGSGSGTDFTLTI |
| | SRLEPEDFAVYYCFQGSHVP |
| | YTFGQGTKVEIK |
| | (SEQ ID NO: 1117) |
| Antibody 6H6 | Antibody 6H6 |
| 6H6V4-1 | DIVMTQSPDSLAVSLGERAT |
| | INCKSSQSVFYSSNQKNYLA |
| | WYQQKPGQPPKLLIYWASTR |
| | ESGVPDRFSGSGSGTDFTLT |
| | ISSLQAEDVAVYYCHQYLSS |
| | LTFGQGTKVEIK |
| | (SEQ ID NO: 1500) |
| 6H6V2-28 | DIVMTQSPLSLPVTPGEPAS |
| | ISCKSSQSVFYSSNQKNYLA |
| | WYLQKPGQSPQLLIYWASTR |
| | ESGVPDRFSGSGSGTDFTLK |
| | ISRVEAEDVGVYYCHQYLSS |
| | LTFGQGTKVEIK |
| | (SEQ ID NO: 1501) |
| 6H6V2-30 | DVVMTQSPLSLPVTLGQPASI |
| | SCKSSQSVFYSSNQKNYLAW |
| | FQQRPGQSPRRLIYWASTRE |
| | SGVPDRFSGSGSGTDFTLKI |
| | SRVEAEDVGVYYCHQYLSSL |
| | TFGQGTKVEIK |
| | (SEQ ID NO: 1502) |
| 6H6V1-5 | DIQMTQSPSTLSASVGDRVT |
| | ITCKSSQSVFYSSNQKNYLA |
| | WYQQKPGKAPKLLIYWASTR |
| | ESGVPSRFSGSGSGTEFTLT |
| | ISSLQPDDFATYYCHQYLSS |
| | LTFGQGTKVEIK |
| | (SEQ ID NO: 1503) |
| 6H6V1-9 | DIQLTQSPSFLSASVGDRVT |
| | ITCKSSQSVFYSSNQKNYLA |
| | WYQQKPGKAPKLLIYWASTR |
| | ESGVPSRFSGSGSGTEFTLT |
| | ISSLQPEDFATYYCHQYLSS |
| | LTFGQGTKVEIK |
| | (SEQ ID NO: 1504) |
| 6H6V3-I5 | EIVMTQSPATLSVSPGERAT |
| | LSCKSSQSVFYSSNQKNYLA |
| | WYQQKPGQAPRLLIYWASTR |
| | ESGIPARFSGSGSGTEFTLT |
| | ISSLQSEDFAVYYCHQYLSS |
| | LTFGQGTKVEIK |
| | (SEQ ID NO: 1505) |
| 6H6V1-33 | DIQMTQSPSSLSASVGDRVT |
| | ITCKSSQSVFYSSNQKNYLA |
| | WYQQKPGKAPKLLIYWASTR |
| | ESGVPSRFSGSGSGTDFTFT |
| | ISSLQPEDIATYYCHQYLSS |
| | LTFGQGTKVEIK |
| | (SEQ ID NO: 1506) |
| 6H6V3-11 | EIVLTQSPATLSLSPGERAT |
| | LSCKSSQSVFYSSNQKNYLA |
| | WYQQKPGQAPRLLIYWASTR |
| | ESGIPARFSGSGSGTDFTLT |
| | ISSLEPEDFAVYYCHQYLSS |
| | LTFGQGTKVEIK |
| | (SEQ ID NO: 1507) |
| 6H6V1-39 | DIQMTQSPSSLSASVGDRVT |
| | ITCKSSQSVFYSSNQKNYLA |
| | WYQQKPGKAPKLLIYWASTR |
| | ESGVPSRFSGSGSGTDFTLT |
| | ISSLQPEDFATYYCHQYLSS |
| | LTFGQGTKVEIK |
| | (SEQ ID NO: 1508) |
| 6H6V3-20 | EIVLTQSPGTLSLSPGERAT |
| | LSCKSSQSVFYSSNQKNYLA |
| | WYQQKPGQAPRLLIYWASTR |
| | ESGIPDRFSGSGSGTDFTLT |
| | ISRLEPEDFAVYYCHQYLSS |
| | LTFGQGTKVEIK |
| | (SEQ ID NO: 1509) |
| Antibody 7A9 | Antibody 7A9 |
| 7A9V1-9 | DIQLTQSPSFLSASVGDRVT |
| | ITCRASENIYSYLAWYQQKP |
| | GKAPKLLIYKAKTLAEGVPS |
| | RFSGSGSGTEFTLTISSLQP |
| | EDFATYYCQHHYGTPFTFGQ |
| | GTKVEIK |
| | (SEQ ID NO: 1132) |
| 7A9V3-11 | EIVLTQSPATLSLSPGERAT |
| | LSCRASENIYSYLAWYQQKP |
| | GQAPRLLIYKAKTLAEGIPA |
| | RFSGSGSGTDFTLTISSLEP |
| | EDFAVYYCQHHYGTPFTFGQ |
| | GTKVEIK |
| | (SEQ ID NO: 1133) |
| 7A9V1-5 | DIQMTQSPSTLSASVGDRVT |
| | ITCRASENIYSYLAWYQQKP |
| | GKAPKLLIYKAKTLAEGVPS |
| | RFSGSGSGTEFTLTISSLQP |
| | DDFATYYCQHHYGTPFTFGQ |
| | GTKVEIK |
| | (SEQ ID NO: 1134) |
| 7A9V3-15 | EIVMTQSPATLSVSPGERAT |
| | LSCRASENIYSYLAWYQQKP |
| | GQAPRLLIYKAKTLAEGIPA |
| | RFSGSGSGTEFTLTISSLQS |
| | EDFAVYYCQHHYGTPFTFGQ |
| | GTKVEIK |
| | (SEQ ID NO: 1135) |
| 7A9V1-39 | DIQMTQSPSSLSASVGDRVT |
| | ITCRASENIYSYLAWYQQKP |
| | GKAPKLLIYKAKTLAEGVPS |
| | RFSGSGSGTDFTLTISSLQP |
| | EDFATYYCQHHYGTPFTFGQ |
| | GTKVEIK |
| | (SEQ ID NO: 1136) |
| 7A9V1-33 | DIQMTQSPSSLSASVGDRVT |
| | ITCRASENIYSYLAWYQQKP |
| | GKAPKLLIYKAKTLAEGVPS |
| | RFSGSGSGTDFTFTISSLQP |
| | EDIATYYCQHHYGTPFTFGQ |
| | GTKVEIK |
| | (SEQ ID NO: 1137) |
| 7A9V3-20 | EIVLTQSPGTLSLSPGERAT |
| | LSCRASENIYSYLAWYQQKP |
| | GQAPRLLIYKAKTLAEGIPD |
| | RFSGSGSGTDFTLTISRLEP |
| | EDFAVYYCQIUIYGTPFTFG |
| | QGTKVEIK |
| | (SEQ ID NO: 1138) |
| 7A9V2-28 | DIVMTQSPLSLPVTPGEPAS |
| | ISCRASENIYSYLAWYLQKP |
| | GQSPQLLIYKAKTLAEGVPD |
| | RFSGSGSGTDFTLKISRVEA |
| | EDVGVYYCQHHYGTPFTFGQ |
| | GTKVEIK |
| | (SEQ ID NO: 1139) |
| 7A9V4-1 | DIVMTQSPDSLAVSLGERAT |
| | INCRASENIYSYLAWYQQKP |
| | GQPPKLLIYKAKTLAEGVPD |
| | RFSGSGSGTDFTLTISSLQA |
| | EDVAVYYCQHHYGTPFTFGQ |
| | GTKVEIK |
| | (SEQ ID NO: 1140) |
| 7A9V2-30 | DVVMTQSPLSLPVTLGQPASI |
| | SCRASENIYSYLAWFQQRPG |
| | QSPRRLIYKAKTLAEGVPDR |
| | FSGSGSGTDFTLKISRVEAE |
| | DVGVYYCQHHYGTPFTFGQG |
| | TKVEIK |
| | (SEQ ID NO: 1141) |
| Antibody 8A1 | Antibody 8A1 |
| 8A1V3-15 | EIVMTQSPATLSVSPGERAT |
| | LSCRTSENVYSNLAWYQQKP |
| | GQAPRLLIYAATNLADGIPA |
| | RFSGSGSGTEFTLTISSLQS |
| | EDFAVYYCHHFWGTPYTFGQ |
| | GTKVEIK |
| | (SEQ ID NO: 1143) |
| 8A1V3-11 | EIVLTQSPATLSLSPGERAT |
| | LSCRTSENVYSNLAWYQQKP |
| | GQAPRLLIYAATNLADGIPA |
| | RFSGSGSGTDFTLTISSLEP |
| | EDFAVYYCHHFWGTPYTFGQ |
| | GTKVEIK |
| | (SEQ ID NO: 1144) |
| 8A1V1-9 | DIQLTQSPSFLSASVGDRVT |
| | ITCRTSENVYSNLAWYQQKP |
| | GKAPKLLIYAATNLADGVPS |
| | RFSGSGSGTEFTLTISSLQP |
| | EDFATYYCHHFWGTPYTFGQ |
| | GTKVEIK |
| | (SEQ ID NO: 1145) |
| 8A1V1-5 | DIQMTQSPSTLSASVGDRVT |
| | ITCRTSENVYSNLAWYQQKP |
| | GKAPKLLIYAATNLADGVPS |
| | RFSGSGSGTEFTLTISSLQP |
| | DDFATYYCHHFWGTPYTFGQ |
| | GTKVEIK |
| | (SEQ ID NO: 1146) |
| 8A1V1-39 | DIQMTQSPSSLSASVGDRVT |
| | ITCRTSENVYSNLAWYQQKP |
| | GKAPKLLIYAATNLADGVPS |
| | RFSGSGSGTDFTLTISSLQP |
| | EDFATYYCHHFWGTPYTFGQ |
| | GTKVEIK |
| | (SEQ ID NO: 1147) |
| 8A1V1-33 | DIQMTQSPSSLSASVGDRVT |
| | ITCRTSENVYSNLAWYQQKP |
| | GKAPKLLIYAATNLADGVPS |
| | RFSGSGSGTDFTFTISSLQP |
| | EDIATYYCHHFWGTPYTFGQ |
| | GTKVEIK |
| | (SEQ ID NO: 1148) |
| 8A1V3-20 | EIVLTQSPGTLSLSPGERAT |
| | LSCRTSENVYSNLAWYQQKP |
| | GQAPRLLIYAATNLADGIPD |
| | RFSGSGSGTDFTLTISRLEP |
| | EDFAVYYCHHFWGTPYTFGQ |
| | GTKVEIK |
| | (SEQ ID NO: 1149) |
| 8A1V2-28 | DIVMTQSPLSLPVTPGEPAS |
| | ISCRTSENVYSNLAWYLQKP |
| | GQSPQLLIYAATNLADGVPD |
| | RFSGSGSGTDFTLKISRVEA |
| | EDVGVYYCHHFWGTPYTFGQ |
| | GTKVEIK |
| | (SEQ ID NO: 1150) |
| 8A1V2-30 | DVVMTQSPLSLPVTLGQPASI |
| | SCRTSENVYSNLAWFQQRPG |
| | QSPRRLIYAATNLADGVPDR |
| | FSGSGSGTDFTLKISRVEAE |
| | DVGVYYCHHFWGTPYTFGQG |
| | TKVEIK |
| | (SEQ ID NO: 1151) |
| 8A1V4-1 | DIVMTQSPDSLAVSLGERAT |
| | INCRTSENVYSNLAWYQQKP |
| | GQPPKLLIYAATNLADGVPD |
| | RFSGSGSGTDFTLTISSLQA |
| | EDVAVYYCHHFWGTPYTFGQ |
| | GTKVEIK |
| | (SEQ ID NO: 1152) |
| Antibody 9F5 | Antibody 9F5 |
| 9F5V2-30 | DVVMTQSPLSLPVTLGQPASI |
| | SCRSSQSLVHSNGYTYLHWF |
| | QQRPGQSPRRLIYKVSNRFS |
| | GVPDRFSGSGSGTDFTLKIS |
| | RVEAEDVGVYYCSQSTRVPY |
| | TFGQGTKVEIK |
| | (SEQ ID NO: 1154) |
| 9F5V2-28 | DIVMTQSPLSLPVTPGEPAS |
| | ISCRSSQSLVHSNGYTYLHW |
| | YLQKPGQSPQLLIYKVSNRF |
| | SGVPDRFSGSGSGTDFTLKI |
| | SRVEAEDVGVYYCSQSTRVP |
| | YTFGQGTKVEIK |
| | (SEQ ID NO: 1155) |
| 9F5V4-1 | DIVMTQSPDSLAVSLGERAT |
| | INCRSSQSLVHSNGYTYLHW |
| | YQQKPGQPPKLLIYKVSNRF |
| | SGVPDRFSGSGSGTDFTLTI |
| | SSLQAEDVAVYYCSQSTRVP |
| | YTFGQGTKVEIK |
| | (SEQ ID NO: 1156) |
| 9F5V3-11 | EIVLTQSPATLSLSPGERAT |
| | LSCRSSQSLVHSNGYTYLHW |
| | YQQKPGQAPRLLIYKVSNRF |
| | SGIPARFSGSGSGTDFTLTI |
| | SSLEPEDFAVYYCSQSTRVP |
| | YTFGQGTKVELK |
| | (SEQ ID NO: 1157) |
| 9F5V1-33 | DIQMTQSPSSLSASVGDRVT |
| | ITCRSSQSLVHSNGYTYLHW |
| | YQQKPGKAPKLLIYKVSNRF |
| | SGVPSRFSGSGSGTDFTFTI |
| | SSLQPEDIATYYCSQSTRVP |
| | YTFGQGTKVEIK |
| | (SEQ ID NO: 1158) |
| 9F5V3-15 | EIVMTQSPATLSVSPGERAT |
| | LSCRSSQSLVHSNGYTYLHW |
| | YQQKPGQAPRLLIYKVSNRF |
| | SGIPARFSGSGSGTEFTLTI |
| | SSLQSEDFAVYYCSQSTRVP |
| | YTFGQGTKVEIK |
| | (SEQ ID NO: 1159) |
| 9F5V1-5 | DIQMTQSPSTLSASVGDRVT |
| | ITCRSSQSLVHSNGYTYLHW |
| | YQQKPGKAPKLLIYKVSNRF |
| | SGVPSRFSGSGSGTEFTLTI |
| | SSLQPDDFATYYCSQSTRVP |
| | YTFGQGTKVEIK |
| | (SEQ ID NO: 1160) |
| 9F5V1-39 | DIQMTQSPSSLSASVGDRVT |
| | ITCRSSQSLVHSNGYTYLIT |
| | WYQQKPGKAPKLLIYKVSNR |
| | FSGVPSRFSGSGSGTDFTLT |
| | ISSLQPEDFATYYCSQSTRV |
| | PYTFGQGTKVEIK |
| | (SEQ ID NO: 1161) |
| 9F5V1-9 | DIQLTQSPSFLSASVGDRVT |
| | ITCRSSQSLVHSNGYTYLHW |
| | YQQKPGKAPKLLIYKVSNRF |
| | SGVPSRFSGSGSGTEFTLTI |
| | SSLQPEDFATYYCSQSTRVP |
| | YTFGQGTKVEIK |
| | (SEQ ID NO: 1162) |
| 9F5V3-20 | EIVLTQSPGTLSLSPGERAT |
| | LSCRSSQSLVHSNGYTYLHW |
| | YQQKPGQAPRLLIYKVSNRF |
| | SGIPDRFSGSGSGTDFTLTI |
| | SRLEPEDFAVYYCSQSTRVP |
| | YTFGQGTKVEIK |
| | (SEQ ID NO: 1163) |
| 9F5-L1 | DIVMTQTPLSLSVTPGQPAS |
| | ISCRSSQSLVHSNGYTYLHW |
| | YLQKPGQSPQLLIYKVSNRF |
| | SGVPDRFSGSGSGTDFTLKI |
| | SRVEAEDVGVYYCSQSTRVP |
| | YTFGQGTKLEIK |
| | (SEQ ID NO: 1663) |
| 9F5-L2 | DVVMTQTPLSLSVTPGQPAS |
| | ISCRSSQSLVHSNGYTYLHW |
| | YLQKPGQSPQLLIYKVSNRF |
| | SGVPDRFSGSGSGTDFTLKI |
| | SRVEAEDVGVYYCSQSTRVP |
| | YTFGQG TKLEIK |
| | (SEQ ID NO: 1664) |
| Antibody 9G1 | Antibody 9G1 |
| 9G1V2-30 | DVVMTQSPLSLPVTLGQPASI |
| | SCRFSQSLVHSNGNTYLHWF |
| | QQRPGQSPRRLIYKVSNRFS |
| | GVPDRFSGSGSGTDFTLKIS |
| | RVEAEDVGVYYCSQSTRVPP |
| | TFGQGTKVEIK |
| | (SEQ ID NO: 1165) |
| 9G1V2-28 | DIVMTQSPLSLPVTPGEPAS |
| | ISCRFSQSLVHSNGNTYLHW |
| | YLQKPGQSPQLLIYKVSNRF |
| | SGVPDRFSGSGSGTDFTLKI |
| | SRVEAEDVGVYYCSQSTRVP |
| | PTFGQGTKVEIK |
| | (SEQ ID NO: 1166) |
| 9G1V4-1 | DIVMTQSPDSLAVSLGERAT |
| | INCRFSQSLVHSNGNTYLHW |
| | YQQKPGQPPKLLIYKVSNRF |
| | SGVPDRFSGSGSGTDFTLTI |
| | SSLQAEDVAVYYCSQSTRVP |
| | PTFGQGTKVEIK |
| | (SEQ ID NO: 1167) |
| 9G1V3-11 | EIVLTQSPATLSLSPGERAT |
| | LSCRFSQSLVHSNGNTYLHW |
| | YQQKPGQAPRLLIYKVSNRF |
| | SGIPARFSGSGSGTDFTLTI |
| | SSLEPEDFAVYYCSQSTRVP |
| | PTFGQGTKVEIK |
| | (SEQ ID NO: 1168) |
| 9G1V3-15 | EIVMTQSPATLSVSPGERAT |
| | LSCRFSQSLVHSNGNTYLHW |
| | YQQKPGQAPRLLIYKVSNRF |
| | SGIPARFSGSGSGTEFTLTI |
| | SSLQSEDFAVYYCSQSTRVP |
| | PTFGQGTKVEIK |
| | (SEQ ID NO: 1169) |
| 9G1V1-9 | DIQLTQSPSFLSASVGDRVT |
| | ITCRFSQSLVHSNGNTYLHW |
| | YQQKPGKAPKLLIYKVSNRF |
| | SGVPSRFSGSGSGTEFTLTI |
| | SSLQPEDFATYYCSQSTRVP |
| | PTFGQGTKVEIK |
| | (SEQ ID NO: 1170) |
| 9G1V1-5 | DIQMTQSPSTLSASVGDRVT |
| | ITCRFSQSLVHSNGNTYLHW |
| | YQQKPGKAPKLLIYKVSNRF |
| | SGVPSRFSGSGSGTEFTLTI |
| | SSLQPDDFATYYCSQSTRVP |
| | PTFGQGTKVEIK |
| | (SEQ ID NO: 1171) |
| 9G1V1-39 | DIQMTQSPSSLSASVGDRVT |
| | ITCRFSQSLVHSNGNTYLHW |
| | YQQKPGKAPKLLIYKVSNRF |
| | SGVPSRFSGSGSGTDFTLTI |
| | SSLQPEDFATYYCSQSTRVP |
| | PTFGQGTKVEIK |
| | (SEQ ID NO: 1172) |
| 9G1V1-33 | DIQMTQSPSSLSASVGDRVT |
| | ITCRFSQSLVHSNGNTYLHW |
| | YQQKPGKAPKLLIYKVSNRF |
| | SGVPSRFSGSGSGTDFTFTI |
| | SSLQPEDIATYYCSQSTRVP |
| | PTFGQGTKVEIK |
| | (SEQ ID NO: 1173) |
| 9G1V3-20 | EIVLTQSPGTLSLSPGERAT |
| | LSCRFSQSLVHSNGNTYLHW |
| | YQQKPGQAPRLLIYKVSNRF |
| | SGIPDRFSGSGSGTDFTLTI |
| | SRLEPEDFAVYYCSQSTRVP |
| | PTFGQGTKVEIK |
| | (SEQ ID NO: 1174) |
| Antibody 9G3 | Antibody 9G3 |
| 9G3V1-33 | DIQMTQSPSSLSASVGDRVT |
| | ITCKASSNVNYMSWYQQKPG |
| | KAPKLLIYFTSNLPSGVPSR |
| | FSGSGSGTDFTFTISSLQPE |
| | DIATYYCSGEVTQFTFGQGT |
| | KVEIK |
| | (SEQ ID NO: 1176) |
| 9G3V1-9 | DIQLTQSPSFLSASVGDRVT |
| | ITCKASSNVNYMSWYQQKPG |
| | KAPKLLIYFTSNLPSGVPSR |
| | FSGSGSGTEFTLTISSLQPE |
| | DFATYYCSGEVTQFTFGQGT |
| | KVEIK |
| | (SEQ ID NO: 1177) |
| 9G3V1-39 | DIQMTQSPSSLSASVGDRVT |
| | ITCKASSNVNYMSWYQQKPG |
| | KAPKLLIYFTSNLPSGVPSR |
| | FSGSGSGTDFTLTISSLQPE |
| | DFATYYCSGEVTQFTFGQGT |
| | KVEIK |
| | (SEQ ID NO: 1178) |
| 9G3V3-11 | EIVLTQSPATLSLSPGERAT |
| | LSCKASSNVNYMSWYQQKPG |
| | QAPRLLIYFTSNLPSGIPAR |
| | FSGSGSGTDFTLTISSLEPE |
| | DFAVYYCSGEVTQFTFGQGT |
| | KVEIK |
| | (SEQ ID NO: 1641) |
| 9G3V1-5 | DIQMTQSPSTLSASVGDRVT |
| | ITCKASSNVNYMSWYQQKPG |
| | KAPKLLIYFTSNLPSGVPSR |
| | FSGSGSGTEFTLTISSLQPD |
| | DFATYYCSGEVTQFTFGQGT |
| | KVEIK |
| | (SEQ ID NO: 1179) |
| 9G3V3-15 | EIVMTQSPATLSVSPGERAT |
| | LSCKASSNVNYMSWYQQKPG |
| | QAPRLLIYFTSNLPSGIPAR |
| | FSGSGSGTEFTLTISSLQSE |
| | DFAVYYCSGEVTQFTFGQGT |
| | KVEIK |
| | (SEQ ID NO: 1180) |
| 9G3V3-20 | EIVLTQSPGTLSLSPGERAT |
| | LSCKASSNVNYMSWYQQKPG |
| | QAPRLLIYFTSNLPSGIPDR |
| | FSGSGSGTDFTLTISRLEPE |
| | DFAVYYCSGEVTQFTFGQGT |
| | KVEIK |
| | (SEQ ID NO: 1181) |
| 9G3V2-28 | DIVMTQSPLSLPVTPGEPAS |
| | ISCKASSNVNYMSWYLQKPG |
| | QSPQLLIYFTSNLPSGVPDR |
| | FSGSGSGTDFTLKISRVEAE |
| | DVGVYYCSGEVTQFTFGQGT |
| | KVEIK |
| | (SEQ ID NO: 1182) |
| 9G3V2-30 | DVVMTQSPLSLPVTLGQPAS |
| | ISCKASSNVNYMSWFQQRPG |
| | QSPRRLIYFTSNLPSGVPDR |
| | FSGSGSGTDFTLKISRVEAE |
| | DVGVYYCSGEVTQFTFGQGT |
| | KVEIK |
| | (SEQ ID NO: 1183) |
| 9G3V4-1 | DIVMTQSPDSLAVSLGERAT |
| | INCKASSNVNYMSWYQQKPG |
| | QPPKLLIYFTSNLPSGVPDR |
| | FSGSGSGTDFTLTISSLQAE |
| | DVAVYYCSGEVTQFTFGQGT |
| | KVEIK |
| | (SEQ ID NO: 1184) |
| Antibody 10A9 | Antibody 10A9 |
| 10A9V2-30 | DVVMTQSPLSLPVTLGQPASI |
| | SCRSSQTIIHSNGNTYLEWF |
| | QQRPGQSPRRLIYKVSNRFC |
| | GVPDRFSGSGSGTDFTLKIS |
| | RVEAEDVGVYYCFQGSHVPY |
| | TFGQGTKVEIK |
| | (SEQ ID NO: 1186) |
| 10A9V2-28 | DIVMTQSPLSLPVTPGEPAS |
| | ISCRSSQTIIHSNGNTYLEW |
| | YLQKPGQSPQLLIYKVSNRF |
| | CGVPDRFSGSGSGTDFTLKI |
| | SRVEAEDVGVYYCFQGSHVP |
| | YTFGQGTKVEIK |
| | (SEQ ID NO: 1187) |
| 10A9V4-1 | DIVMTQSPDSLAVSLGERAT |
| | INCRSSQTIIHSNGNTYLEW |
| | YQQKPGQPPKLLIYKVSNRF |
| | CGWDRFSGSGSGTDFTLTIS |
| | SLQAEDVAVYYCFQGSHVPY |
| | TFGQGTKVEIK |
| | (SEQ ID NO: 1188) |
| 10A9V3-11 | EIVLTQSPATLSLSPGERAT |
| | LSCRSSQTIIHSNGNTYLEW |
| | YQQKPGQAPRLLIYKVSNRF |
| | CGIPARFSGSGSGTDFTLTI |
| | SSLEPEDFAVYYCFQGSHVP |
| | YTFGQGTKV EIK |
| | (SEQ ID NO: 1189) |
| 10A9V3-I5 | EIVMTQSPATLSVSPGERAT |
| | LSCRSSQTIIHSNGNTYLEW |
| | YQQKPGQAPRLLIYKVSNRF |
| | CGIPARFSGSGSGTEFTLTI |
| | SSLQSEDFAVYYCFQGSHVP |
| | YTFGQGTKVEIK |
| | (SEQ ID NO: 1190) |
| 10A9V1-33 | DIQMTQSPSSLSASVGDRVT |
| | ITCRSSQTIIHSNGNTYLEW |
| | YQQKPGKAPKLLIYKVSNRF |
| | CGVPSRFSGSGSGTDFTFTI |
| | SSLQPEDIATYYCFQGSHVP |
| | YTFGQGTKVEIK |
| | (SEQ ID NO: 1191) |
| 10A9V3-20 | EIVLTQSPGTLSLSPGERAT |
| | LSCRSSQTIIHSNGNTYLEW |
| | YQQKPGQAPRLLIYKVSNRF |
| | CGIPDRFSGSGSGTDFTLTI |
| | SRLEPEDFAVYYCFQGSHVP |
| | YTFGQGTKVEIK |
| | (SEQ ID NO: 1192) |
| 10A9V1-9 | DIQLTQSPSFLSASVGDRVT |
| | ITCRSSQTIIHSNGNTYLEW |
| | YQQKPGKAPKLLIYKVSNRF |
| | CGVPSRFSGSGSGTEFTLTI |
| | SSLQPEDFATYYCFQGSHVP |
| | YTFGQGTKVEIK |
| | (SEQ ID NO: 1193) |
| 10A9V1-5 | DIQMTQSPSTLSASVGDRVT |
| | ITCRSSQTIIHSNGNTYLEW |
| | YQQKPGKAPKLLIYKVSNRF |
| | CGVPSRFSGSGSGTEFTLTI |
| | SSLQPDDFATYYCFQGSHVP |
| | YTFGQGTKVEIK |
| | (SEQ ID NO: 1194) |
| 10A9V1-39 | DIQMTQSPSSLSASVGDRVT |
| | ITCRSSQTIIHSNGNTYLEW |
| | YQQKPGKAPKLLIYKVSNRF |
| | CGVPSRFSGSGSGTDFTLTI |
| | SSLQPEDFATYYCFQGSHVP |
| | YTFGQGTKVEIK |
| | (SEQ ID NO: 1195) |
| Antibody 11A8 | Antibody 11A8 |
| 11A8V4-1 | DIVMTQSPDSLAVSLGERAT |
| | INCKSSQSLLNSGNQKKYLT |
| | WYQQKPGQPPKLLIYWASTR |
| | ESGVPDRFSGSGSGTDFTLT |
| | ISSLQAEDVAVYYCQNDYGF |
| | PLTFGQGTKVEIK |
| | (SEQ ID NO: 1197) |
| 11A8V2-30 | DVVMTQSPLSLPVTLGQPASI |
| | SCKSSQSLLNSGNQKKYLTW |
| | FQQRPGQSPRRLIYWASTRE |
| | SGVPDRFSGSGSGTDFTLKI |
| | SRVEAEDVGVYYCQNDYGFP |
| | LTFGQGTKVEIK |
| | (SEQ ID NO: 1198) |
| 11A8V2-28 | DIVMTQSPLSLPVTPGEPAS |
| | ISCKSSQSLLNSGNQKKYLT |
| | WYLQKPGQSPQLLIYWASTR |
| | ESGVPDRFSGSGSGTDFTLK |
| | ISRVEAEDVGVYYCQNDYGF |
| | PLTFGQGTKVEIK |
| | (SEQ ID NO: 1199) |
| 11A8V1-33 | DIQMTQSPSSLSASVGDRVT |
| | ITCKSSQSLLNSGNQKKYLT |
| | WYQQKPGKAPKLLIYWAST |
| | RESGVPSRFSGSGSGTD |
| | FTFTISSLQPEDIATYYCQN |
| | DYGFPLTFGQGTKVEIK |
| | (SEQ ID NO: 1200) |
| 11A8V3-11 | EIVLTQSPATLSLSPGERAT |
| | LSCKSSQSLLNSGNQKKYLT |
| | WYQQKPGQAPRLLIYWASTR |
| | ESGIPARFSGSGSGTDFTLT |
| | ISSLEPEDFAVYYCQNDYGF |
| | PLTFGQGTKVEIK |
| | (SEQ ID NO: 1201) |
| 11A8V3-15 | EIVMTQSPATLSVSPGERAT |
| | LSCKSSQSLLNSGNQKKYLT |
| | WYQQKPGQAPRLLIYWASTR |
| | ESGIPARFSGSGSGTE |
| | FTLTISSLQSEDFAVYYCQN |
| | DYGFPLTFGQGTK VEIK |
| | (SEQ ID NO: 1202) |
| 11A8V1-5 | DIQMTQSPSTLSASVGDRVT |
| | ITCKSSQSLLNSGNQKKYLT |
| | WYQQKPGKAPKLLIYWASTR |
| | ESGVPSRFSGSGSGTEFTLT |
| | ISSLQPDDFATYYCQNDYGF |
| | PLTFGQGTKVEIK |
| | (SEQ ID NO: 1203) |
| 11A8V3-20 | EIVLTQSPGTLSLSPGERAT |
| | LSCKSSQSLLNSGNQKKYLT |
| | WYQQKPGQAPRLLIYWASTR |
| | ESGIPDRFSGSGSGTDFTLT |
| | ISRLEPEDFAVYYCQNDYGF |
| | PLTFGQGTKVEIK |
| | (SEQ ID NO: 1204) |
| 11A8V1-9 | DIQLTQSPSFLSASVGDRVT |
| | ITCKSSQSLLNSGNQKKYLT |
| | WYQQKPGKAPKLLIYWASTR |
| | ESGVPSRFSGSGSGTEFTLT |
| | ISSLQPEDFATYYCQNDYGF |
| | PLTFGQGTKVEIK |
| | (SEQ ID NO: 1205) |
| 11A8V1-39 | DIQMTQSPSSLSASVGDRVT |
| | ITCKSSQSLLNSGNQKKYLT |
| | WYQQKPGKAPKLLIYWASTR |
| | ESGVPSRFSGSGSGTDFTLT |
| | ISSLQPEDFATYYCQNDYGF |
| | PLTFGQGTKVEIK |
| | (SEQ ID NO: 1206) |
| Antibody 12D9 | Antibody 12D9 |
| 12D9V4-1 | DIVMTQSPDSLAVSLGERAT |
| | INCKSSQSLLYSGNQKNFLA |
| | WYQQKPGQPPKLLIYWASTR |
| | ESGVPDRFSGSGSGTDFTLT |
| | ISSLQAEDVAVYYCQQYYSY |
| | PFTFGQGTKVEIK |
| | (SEQ ID NO: 1208) |
| 12D9V2-28 | DIVMTQSPLSLPVTPGEPAS |
| | ISCKSSQSLLYSGNQKNFLA |
| | WYLQKPGQSPQLLIYWASTR |
| | ESGVPDRFSGSGSGTDFTLK |
| | ISRVEAEDVGVYYCQQYYSY |
| | PFTFGQGTKVEIK |
| | (SEQ ID NO: 1209) |
| 12D9V2-30 | DVVMTQSPLSLPVTLGQPASI |
| | SCKSSQSLLYSGNQKNFLAW |
| | FQQRPGQSPRRLIYWASTRE |
| | SGVPDRFSGSGSGTDFTLKI |
| | SRVEAEDVGVYYCQQYYSYP |
| | FTFGQGTKVEIK |
| | (SEQ ID NO: 1210) |
| 12D9V1-9 | DIQLTQSPSFLSASVGDRVT |
| | ITCKSSQSLLYSGNQKNFLA |
| | WYQQKPGKAPKLLIYWASTR |
| | ESGVPSRFSGSGSGTEFTLT |
| | ISSLQPEDFATYYCQQYYSY |
| | PFTFGQGTKVEIK |
| | (SEQ ID NO: 1211) |
| 12D9V1-5 | DIQMTQSPSTLSASVGDRVT |
| | ITCKSSQSLLYSGNQKNFLA |
| | WYQQKPGKAPKLLIYWASTR |
| | ESGVPSRFSGSGSGTEFTLT |
| | ISSLQPDDFATYYCQQYYSY |
| | PFTFGQGTKVEIK |
| | (SEQ ID NO: 1212) |
| 12D9V3-15 | EIVMTQSPATLSVSPGERAT |
| | LSCKSSQSLLYSGNQKNFLA |
| | WYQQKPGQAPRLLIYWASTR |
| | ESGIPARFSGSGSGTEFTLT |
| | ISSLQSEDFAVYYCQQYYSY |
| | PFTFGQGTKVEIK |
| | (SEQ ID NO: 1213) |
| 12D9V1-33 | DIQMTQSPSSLSASVGDRVT |
| | ITCKSSQSLLYSGNQKNFLA |
| | WYQQKPGKAPKLLIYWASTR |
| | ESGVPSRFSGSGSGTDFTFT |
| | ISSLQPEDIATYYCQQYYSY |
| | PFTFGQGTKVEIK |
| | (SEQ ID NO: 1214) |
| 12D9V3-11 | EIVLTQSPATLSLSPGERAT |
| | LSCKSSQSLLYSGNQKNFLA |
| | WYQQKPGQAPRLLIYWASTR |
| | ESGIPARFSGSGSGTDFTLT |
| | ISSLEPEDFAVYYCQQYYSY |
| | PFTFGQGTKVEIK |
| | (SEQ ID NO: 1215) |
| 12D9V1-39 | DIQMTQSPSSLSASVGDRVT |
| | ITCKSSQSLLYSGNQKNFLA |
| | WYQQKPGKAPKLLIYWASTR |
| | ESGVPSRFSGSGSGTDFTLT |
| | ISSLQPEDFATYYCQQYYSY |
| | PFTFGQGTKVEIK |
| | (SEQ ID NO: 1216) |
| 12D9V3-20 | EIVLTQSPGTLSLSPGERAT |
| | LSCKSSQSLLYSGNQKNFLA |
| | WYQQKPGQAPRLLIYWASTR |
| | ESGIPDRFSGSGSGTDFTLT |
| | ISRLEPEDFAVYYCQQYYSY |
| | PFTFGQGTKVEIK |
| | (SEQ ID NO: 1217) |
| Antibody 12F9 | Antibody 12F9 |
| 12F9V4-1 | DIVMTQSPDSLAVSLGERAT |
| | INCKSSQSLLYSSDQKNYLA |
| | WYQQKPGQPPKLLIYWASTR |
| | ESGVPDRFSGSGSGTDFTLT |
| | ISSLQAEDVAVYYCQQYYSY |
| | PLTFGQGTKVEIK |
| | (SEQ ID NO: 1120) |
| 12F9V2-28 | DIVMTQSPLSLPVTPGEPAS |
| | ISCKSSQSLLYSSDQKNYLA |
| | WYLQKPGQSPQLLIYWASTR |
| | ESGVPDRFSGSGSGTDFTLK |
| | ISRVEAEDVGVYYCQQYYSY |
| | PLTFGQGTKVEIK |
| | (SEQ ID NO: 1121) |
| 12F9V2-30 | DVVMTQSPLSLPVTLGQPASI |
| | SCKSSQSLLYSSDQKNYLAW |
| | FQQRPGQSPRRLIYWASTRE |
| | SGVPDRFSGSGSGTDFTLKI |
| | SRVEAEDVGVYYCQQYYSYP |
| | LTFGQGTKVEIK |
| | (SEQ ID NO: 1122) |
| 12F9V3-15 | EIVMTQSPATLSVSPGERAT |
| | LSCKSSQSLLYSSDQKNYLA |
| | WYQQKPGQAPRLLIYWASTR |
| | ESGIPARFSGSGSGTEFTLT |
| | ISSLQSEDFAVYYCQQYYSY |
| | PLTFGQGTKVEIK |
| | (SEQ ID NO: 1125) |
| 12F9V1-5 | DIQMTQSPSTLSASVGDRVT |
| | ITCKSSQSLLYSSDQKNYLA |
| | WYQQKPGKAPKLLIYWASTR |
| | ESGVPSRFSGSGSGTEFTLT |
| | ISSLQPDDFATYYCQQYYSY |
| | PLTFGQGTKVEIK |
| | (SEQ ID NO: 1123) |
| 12F9V1-9 | DIQLTQSPSFLSASVGDRVT |
| | ITCKSSQSLLYSSDQKNYLA |
| | WYQQKPGKAPKLLIYWASTR |
| | ESGVPSRFSGSGSGTEFTLT |
| | ISSLQPEDFATYYCQQYYSY |
| | PLTFGQGTKVEIK |
| | (SEQ ID NO: 1124) |
| 12F9V1-33 | DIQMTQSPSSLSASVGDRVT |
| | ITCKSSQSLLYSSDQKNYLA |
| | WYQQKPGKAPKLLIYWASTR |
| | ESGVPSRFSGSGSGTDFTFT |
| | ISSLQPEDIATYYCQQYYSY |
| | PLTFGQGTKVEIK |
| | (SEQ ID NO: 1128) |
| 12F9V3-11 | EIVLTQSPATLSLSPGERAT |
| | LSCKSSQSLLYSSDQKNYLA |
| | WYQQKPGQAPRLLIYWASTR |
| | ESGIPARFSGSGSGTDFTLT |
| | ISSLEPEDFAVYYCQQYYSY |
| | PLTFGQGTKVEIK |
| | (SEQ ID NO: 1127) |
| 12F9V1-39 | DIQMTQSPSSLSASVGDRVT |
| | ITCKSSQSLLYSSDQKNYLA |
| | WYQQKPGKAPKLLIYWASTR |
| | ESGVPSRFSGSGSGTDFTLT |
| | ISSLQPEDFATYYCQQYYSY |
| | PLTFGQGTKVEIK |
| | (SEQ ID NO: 1126) |
| 12F9V3-20 | EIVLTQSPGTLSLSPGERAT |
| | LSCKSSQSLLYSSDQKNYLA |
| | WYQQKPGQAPRLLIYWASTR |
| | ESGIPDRFSGSGSGTDFTLT |
| | ISRLEPEDFAVYYCQQYYSY |
| | PLTFGQGTKVEIK |
| | (SEQ ID NO: 1129) |
| Antibody 10C1 | Antibody 10C1 |
| 10C1V4-1 | DIVMTQSPDSLAVSLGERAT |
| | INCKSSQSVFYSSNQKNYLA |
| | WYQQKPGQPPKLLIYWASTR |
| | ESGVPDRFSGSGSGTDFTLT |
| | ISSLQAEDVAVYYCHQYLSS |
| | LTFGQGTKVEIK |
| | (SEQ ID NO: 1423) |
| 10C1V2-30 | DVVMTQSPLSLPVTLGQPASI |
| | SCKSSQSVFYSSNQKNYLAW |
| | FQQRPGQSPRRLIYWASTRE |
| | SGVPDRFSGSGSGTDFTLKI |
| | SRVEAEDVGVYYCHQYLSSL |
| | TFGQGTKVEIK |
| | (SEQ ID NO: 1424) |
| 10C1V2-28 | DIVMTQSPLSLPVTPGEPAS |
| | ISCKSSQSVFYSSNQKNYLA |
| | WYLQKPGQSPQLLIYWASTR |
| | ESGVPDRFSGSGSGTDFTLK |
| | ISRVEAEDVGVYYCHQYLSS |
| | LTFGQGTKVEIK |
| | (SEQ ID NO: 1425) |
| 10C1V1-5 | DIQMTQSPSTLSASVGDRVT |
| | ITCKSSQSVFYSSNQKNYLA |
| | WYQQKPGKAPKLLIYWASTR |
| | ESGVPSRFSGSGSGTEFTLT |
| | ISSLQPDDFATYYCHQYLSS |
| | LTFGQGTKVEIK |
| | (SEQ ID NO: 1426) |
| 10C1V3-15 | EIVMTQSPATLSVSPGERAT |
| | LSCKSSQSVFYSSNQKNYLA |
| | WYQQKPGQAPRLLIYWASTR |
| | ESGIPARFSGSGSGTEFTLT |
| | ISSLQSEDFAVYYCHQYLSS |
| | LTFGQGTKVEIK |
| | (SEQ ID NO: 1427) |
| 10C1V1-9 | DIQLTQSPSFLSASVGDRVT |
| | ITCKSSQSVFYSSNQKNYLA |
| | WYQQKPGKAPKLLIYWASTR |
| | ESGVPSRFSGSGSGTEFTLT |
| | ISSLQPEDFATYYCHQYLSS |
| | LTFGQGTKVEIK |
| | (SEQ ID NO: 1428) |
| 10C1V3-11 | EIVLTQSPATLSLSPGERAT |
| | LSCKSSQSVFYSSNQKNYLA |
| | WYQQKPGQAPRLLIYWASTR |
| | ESGIPARFSGSGSGTDFTLT |
| | ISSLEPEDFAVYYCHQYLSS |
| | LTFGQGTKVEIK |
| | (SEQ ID NO: 1429) |
| 10C1V1-39 | DIQMTQSPSSLSASVGDRVT |
| | ITCKSSQSVFYSSNQKNYLA |
| | WYQQKPGKAPKLLIYYVAST |
| | RESGVPSRFSGSGSGTDFTL |
| | TISSLQPEDFATYYCHQYLS |
| | SLTFGQGTKVEIK |
| | (SEQ ID NO: 1430) |
| 10C1V1-33 | DIQMTQSPSSLSASVGDRVT |
| | ITCKSSQSVFYSSNQKNYLA |
| | WYQQKPGKAPKLLIYYV |
| | ASTRESGVPSRFSGSGS |
| | GTDFTFTISSLQPEDIATYY |
| | CHQYLSSLTFGQGTKVEIK |
| | (SEQ ID NO: 1431) |
| 10C1V3-20 | EIVLTQSPGTLSLSPGERAT |
| | LSCKSSQSVFYSSNQKNYLA |
| | WYQQKPGQAPRLLIYWASTR |
| | ESGIPDRFSGSGSGTDFTLT |
| | ISRLEPEDFAVYYCHQYLSS |
| | LTFGQGTKVEIK |
| | (SEQ ID NO: 1432) |
| Antibody 7E9 | Antibody 7E9 |
| 7E9V4-I | DIVMTQSPDSLAVSLGERAT |
| | INCKSSQSLLYSSNQKNCLA |
| | WYQQKPGQPPKLLIYWASTR |
| | ESGVPDRFSGSGSGTDFTLT |
| | ISSLQAEDVAVYYCQQYYSY |
| | PLTFGQ GTKVEIK |
| | (SEQ ID NO: 1434) |
| 7E9V2-28 | DIVMTQSPLSLPVTPGEPAS |
| | ISCKSSQSLLYSSNQKNCLA |
| | WYLQKPGQSPQLLIYWASTR |
| | ESGVPDRFSGSGSGTDFTLK |
| | ISRVEAEDVGVYYCQQYYSY |
| | PLTFGQGTKVEIK |
| | (SEQ ID NO: 1435) |
| 7E9V2-30 | DVVMTQSPLSLPVTLGQPAS |
| | ISCKSSQSLLYSSNQKNCLA |
| | WFQQRPGQSPRRLIYWASTR |
| | ESGVPDRFSGSGSGTDFTLK |
| | 1SRVEAEDVGVYYCQQYYSYP |
| | LTFGQGTKVEIK |
| | (SEQ ID NO: 1436) |
| 7E9V1-9 | DIQLTQSPSFLSASVGDRVTI |
| | TCKSSQSLLYSSNQKNCLAW |
| | YQQKPGKAPKLLIYWASTRE |
| | SGVPSRFSGSGSGTEFTLTI |
| | SSLQPEDFATYYCQQYYSYP |
| | LTFGQGTKVEIK |
| | (SEQ ID NO: 1437) |
| 7E9V3-15 | EIVMTQSPATLSVSPGERAT |
| | LSCKSSQSLLYSSNQKNCLA |
| | WYQQKPGQAPRLLIYWASTR |
| | ESGIPARFSGSGSGTEFTLT |
| | ISSLQSEDFAVYYCQQYYSY |
| | PLTFGQGTKVEIK |
| | (SEQ ID NO: 1438) |
| 7E9V1-5 | DIQMTQSPSTLSASVGDRVT |
| | ITCKSSQSLLYSSNQKNCLA |
| | WYQQKPGKAPKLLIYWASTR |
| | ESGVPSRFSGSGSGTEFTLT |
| | ISSLQPDDFATYYCQQYYSY |
| | PLTFGQGTKVEIK |
| | (SEQ ID NO: 1439) |
| 7E9V1-33 | DIQMTQSPSSLSASVGDRVT |
| | ITCKSSQSLLYSSNQKNCLA |
| | WYQQKPGKAPKLLIYWASTR |
| | ESGVPSRFSGSGSGTDFTFT |
| | ISSLQPEDIATYYCQQYYSY |
| | PLTFGQGTKVEIK |
| | (SEQ ID NO: 1440) |
| 7E9V1-39 | DIQMTQSPSSLSASVGDRVT |
| | ITCKSSQSLLYSSNQKNCLA |
| | WYQQKPGKAPKLLIYWASTR |
| | ESGVPSRFSGSGSGTDFTLT |
| | ISSLQPEDFATYYCQQYYSY |
| | PLTFGQGTKVEIK |
| | (SEQ ID NO: 1441) |
| 7E9V3-11 | EIVLTQSPATLSLSPGERAT |
| | LSCKSSQSLLYSSNQKNCLA |
| | WYQQKPGQAPRLLIYWASTR |
| | ESGIPARFSGSGSGTDFTLT |
| | ISSLEPEDFAVYYCQQYYSY |
| | PLTFGQGTKVEIK |
| | (SEQ ID NO: 1442) |
| 7E9V3-20 | EIVLTQSPGTLSLSPGERAT |
| | LSCKSSQSLLYSSNQKNCLA |
| | WYQQKPGQAPRLLIYWASTR |
| | ESGIPDRFSGSGSGTDFTLT |
| | ISRLEPEDFAVYYCQQYYSY |
| | PLTFGQGTKVEIK |
| | (SEQ ID NO: 1443) |
| Antibody 8C3 | Antibody 8C3 |
| 8C3V2-30 | DVVMTQSPLSLPVTLGQPAS |
| | ISCRSSQSLVHSNGNTYLHW |
| | FQQRPGQSPRRLIYKVSNRF |
| | SGVPDRFSGSGSGTDFTLKI |
| | SRVEAEDVGVYYCSQSTHVP |
| | PTFGQGTKVEIK |
| | (SEQ ID NO: 1445) |
| 8C3V2-28 | DIVMTQSPLSLPVTPGEPAS |
| | ISCRSSQSLVHSNGNTYLHW |
| | YLQKPGQSPQLLIYKVSNRF |
| | SGVPDRFSGSGSGTDFTLKI |
| | SRVEAEDVGVYYCSQSTHVP |
| | PTFGQGTKVEIK |
| | (SEQ ID NO: 1446) |
| 8C3V4-I | DIVMTQSPDSLAVSLGERAT |
| | INCRSSQSLVHSNGNTYLHW |
| | YQQKPGQPPKLLIYKVSNRF |
| | SGVPDRFSGSGSGTDFTLTI |
| | SSLQAEDVAVYYCSQSTHVP |
| | PTFGQGTKVEDC |
| | (SEQ ID NO: 1447) |
| 8C3V3-11 | EIVLTQSPATLSLSPGERAT |
| | LSCRSSQSLVHSNGNTYLHW |
| | YQQKPGQAPRLLIYKVSNRF |
| | SGIPARFSGSGSGTDFTLTI |
| | SSLEPEDFAVYYCSQSTHVP |
| | PTFGQGTKVEIK |
| | (SEQ ID NO: 1448) |
| 8C3V1-33 | DIQMTQSPSSLSASVGDRVT |
| | ITCRSSQSLVHSNGNTYLHW |
| | YQQKPGKAPKLLIYKVSNRF |
| | SGVPSRFSGSGSGTDFTFTI |
| | SSLQPEDIATYYCSQSTHVP |
| | PTFGQGTKVEIK |
| | (SEQ ID NO: 1449) |
| 8C3V1-5 | DIQMTQSPSTLSASVGDRVT |
| | ITCRSSQSLVHSNGNTYLHW |
| | YQQKPGKAPKLLIYKVSNRF |
| | SGVPSRFSGSGSGTEFTLTI |
| | SSLQPDDFATYYCSQSTHVP |
| | PTFGQGTKVEIK |
| | (SEQ ID NO: 1450) |
| 8C3V1-39 | DIQMTQSPSSLSASVGDRVT |
| | ITCRSSQSLVHSNGNTYLHW |
| | YQQKPGKAPKLLIYKVSNRF |
| | SGVPSRFSGSGSGTDFTLTI |
| | SSLQPEDFATYYCSQSTHVP |
| | PTFGQGTKVEIK |
| | (SEQ ID NO: 1451) |
| 8C3V1-9 | DIQLTQSPSFLSASVGDRVT |
| | ITCRSSQSLVHSNGNTYLHW |
| | YQQKPGKAPKLLIYKVSNRF |
| | SGVPSRFSGSGSGTEFTLTI |
| | SSLQPEDFATYYCSQSTHVP |
| | PTFGQGTKVEIK |
| | (SEQ ID NO: 1452) |
| 8C3V3-15 | EIVMTQSPATLSVSPGERAT |
| | LSCRSSQSLVHSNGNTYLHW |
| | YQQKPGQAPRLLIYKVSNRF |
| | SGIPARFSGSGSGTEFTLTI |
| | SSLQSEDFAVYYCSQSTHVP |
| | PTFGQGTKVEIK |
| | (SEQ ID NO: 1453) |
| 8C3V3-20 | EIVLTQSPGTLSLSPGERAT |
| | LSCRSSQSLVHSNGNTYLHW |
| | YQQKPGQAPRLLIYKVSNRF |
| | SGIPDRFSGSGSGTDFTLTI |
| | SRLEPEDFAVYYCSQSTHVP |
| | PTFGQGTKVEIK |
| | (SEQ ID NO: 1454) |

TABLE 7H
Humanized heavy chain variable
region sequences

| Antibody variant | Humanized sequences |
|---|---|
| Antibody 4D11 | Antibody 4D11 |
| 4D11V4-59 | QVQLQESGPGLVKPSETLSL |
| | TCTVSGFTLSSYAMSWIRQP |
| | PGKGLEWVASISRGGSTYYP |
| | PSLKSRVTISVDTSKNQFSL |
| | KLSSVTAADTAVYYCTRGYG |
| | YYRTPFANWGQGTLVTVSS |
| | (SEQ ID NO: 1220) |
| 4D11V3-23 | EVQLLESGGGLVQPGGSLRL |
| | SCAASGFTLSSYAMSWVRQA |
| | PGKGLEWVASISRGGSTYYP |
| | DSVKGRFTISRDNSKNTLYL |
| | QMNSLRAEDTAVYYCTRGYG |
| | YYRTPFANWGQGTLVTVSS |
| | (SEQ ID NO: 1221) |
| 4D11V3-7 | EVQLVESGGGLVQPGGSLRL |
| | SCAASGFTLSSYAMSWVRQA |
| | PGKGLEWVASISRGGSTYYP |
| | DSVKGRFTISRDNAKNSLYL |
| | QMNSLRAEDTAVYYCTRGYG |
| | YYRTPFANWGQGTLVTVSS |
| | (SEQ ID NO: 1222) |
| 4D11V3-48 | EVQLVESGGGLVQPGGSLRL |
| | SCAASGFTLSSYAMSWVRQA |
| | PGKGLEWVASISRGGSTYYP |
| | DSVKGRFTISRDNAKNSLYL |
| | QMNSLRAEDTAVYYCTRGYG |
| | YYRTPFANWGQGTLVTVSS |
| | (SEQ ID NO: 1222) |
| 4D11V3-30 | QVQLVESGGGVVQPGRSLRL |
| | SCAASGFTLSSYAMSWVRQA |
| | PGKGLEWVASISRGGSTYYP |
| | DSVKGRFTISRDNSKNTLYL |
| | QMNSLRAEDTAVYYCTRGYG |
| | YYRTPFANWGQGTLVTVSS |
| | (SEQ ID NO: 1223) |
| 4D11V1-69 | QVQLVQSGAEVKKPGSSVKV |
| | SCKASGFTLSSYAMSWVRQA |
| | PGQGLEWVASISRGGSTYYP |
| | QKFQGRVTITADESTSTAYM |
| | ELSSLRSEDTAVYYCTRGYG |
| | YYRTPFANWGQGTLVTVSS |
| | (SEQ ID NO: 1224) |
| 4D11V1-46 | QVQLVQSGAEVKKPGASVKV |
| | SCKASGFTLSSYAMSWVRQA |
| | PGQGLEWVASISRGGSTYYP |
| | QKFQGRVTMTRDTSTSTVYM |
| | ELSSLRSEDTAVYYCTRGYG |
| | YYRTPFANWGQGTLVTVSS |
| | (SEQ ID NO: 1225) |
| 4D11V5-51 | EVQLVQSGAEVKKPGESLKI |
| | SCKGSGFTLSSYAMSWVRQM |
| | PGKGLEWVASISRGGSTYYP |
| | PSFQGQVTISADKSISTAYL |
| | QWSSLKASDTAMYYCTRGYG |
| | YYRTPFANWGQGTLVTVSS |
| | (SEQ ID NO: 1226) |
| 4D11V4-39 | QLQLQESGPGLVKPSETLSL |
| | TCTVSGFTLSSYAMSWIRQP |
| | PGKGLEWVASISRGGSTYYP |
| | PSLKSRVTISVDTSKNQFSL |
| | KLSSVTAADTAVYYCTRGYG |
| | YYRTPFANWGQGTLVTVSS |
| | (SEQ ID NO: 1227) |
| 4D11V4-30-4 | QVQLQESGPGLVKPSQTLSL |
| | TCTVSGFTLSSYAMSWIRQP |
| | PGKGLEWVASISRGGSTYYP |
| | PSLKSRVTISVDTSKNQFSL |
| | KLSSVTAADTAVYYCTRGYG |
| | YYRTPFANWGQGTLVTVSS |
| | (SEQ ID NO: 1228) |
| Antibody 7C5 | Antibody 7C5 |
| 7C5V4-59 | QVQLQESGPGLVKPSETLSL |
| | TCTVSGFTLSSYAMSWIRQP |
| | PGKGLEWVASISRGGSTYYP |
| | PSLKSRVTISVDTSKNQFSL |
| | KLSSVTAADTAVYYCTRGYG |
| | YYRTPFANWGQGTLVTVSS |
| | (SEQ ID NO: 1220) |
| 7C5V3-23 | EVQLLESGGGLVQPGGSLRL |
| | SCAASGFTLSSYAMSWVRQA |
| | PGKGLEWVASISRGGSTYYP |
| | DSVKGRFTISRDNSKNTLYL |
| | QMNSLRAEDTAVYYCTRGYG |
| | YYRTPFANWGQGTLVTVSS |
| | (SEQ ID NO: 1221) |
| 7C5V3-7 | EVQLVESGGGLVQPGGSLRL |
| | SCAASGFTLSSYAMSWVRQA |
| | PGKGLEWVASISRGGSTYYP |
| | DSVKGRFTISRDNAKNSLYL |
| | QMNSLRAEDTAVYYCTRGYG |
| | YYRTPFANWGQGTLVTVSS |
| | (SEQ ID NO: 1222) |
| 7C5V3-48 | EVQLVESGGGLVQPGGSLRL |
| | SCAASGFTLSSYAMSWVRQA |
| | PGKGLEWVASISRGGSTYYP |
| | DSVKGRFTISRDNAKNSLYL |
| | QMNSLRAEDTAVYYCTRGYG |
| | YYRTPFANWGQGTLVTVSS |
| | (SEQ ID NO: 1222) |
| 7C5V3-30 | QVQLVESGGGVVQPGRSLRL |
| | SCAASGFTLSSYAMSWVRQA |
| | PGKGLEWVASISRGGSTYYP |
| | DSVKGRFTISRDNSKNTLYL |
| | QMNSLRAEDTAVYYCTRGYG |
| | YYRTPFANWGQGTLVTVSS |
| | (SEQ ID NO: 1223) |
| 7C5V1-69 | QVQLVQSGAEVKKPGSSVKV |
| | SCKASGFTLSSYAMSWVRQA |
| | PGQGLEWVASISRGGSTYYP |
| | QKFQGRVTITADESTSTAYM |
| | ELSSLRSEDTAVYYCTRGYG |
| | YYRTPFANWGQGTLVTVSS |
| | (SEQ ID NO: 1224) |
| 7C5V1-46 | QVQLVQSGAEVKKPGASVKV |
| | SCKASGFTLSSYAMSWVRQA |
| | PGQGLEWVASISRGGSTYYP |
| | QKFQGRVTMTRDTSTSTVYM |
| | ELSSLRSEDTAVYYCTRGYG |
| | YYRTPFANWGQGTLVTVSS |
| | (SEQ ID NO: 1225) |
| 7C5V5-51 | EVQLVQSGAEVKKPGESLKI |
| | SCKGSGFTLSSYAMSWVRQM |
| | PGKGLEWVASISRGGSTYYP |
| | PSFQGQVTISADKSISTAYL |
| | QWSSLKASDTAMYYCTRGYG |
| | YYRTPFANWGQGTLVTVSS |
| | (SEQ ID NO: 1226) |
| 7C5V4-39 | QLQLQESGPGLVKPSETLSL |
| | TCTVSGFTLSSYAMSWIRQP |
| | PGKGLEWVASISRGGSTYYP |
| | PSLKSRVTISVDTSKNQFSL |
| | KLSSVTAADTAVYYCTRGYG |
| | YYRTPFANWGQGTLVTVSS |
| | (SEQ ID NO: 1227) |
| 7C5V4-30-4 | QVQLQESGPGLVKPSQTLSL |
| | TCTVSGFTLSSYAMSWIRQP |
| | PGKGLEWVASISRGGSTYYP |
| | PSLKSRVTISVDTSKNQFSL |
| | KLSSVTAADTAVYYCTRGYG |
| | YYRTPFANWGQGTLVTVSS |
| | (SEQ ID NO: 1228) |
| Antibody 6G12 | Antibody 6G12 |
| 6G12V1-46 | QVQLVQSGAEVKKPGASVKV |
| | SCKASGYTFTEYTMHWVRQA |
| | PGQGLEWIGGINPNNGGTSY |
| | SQKFQGRVTMTRDTSTSTVY |
| | MELSSLRSEDTAVYYCARGG |
| | SHYYAMDYWGQGTLVTVSS |
| | (SEQ ID NO: 1230) |
| 6G12V5-51 | EVQLVQSGAEVKKPGESLKI |
| | SCKGSGYTFTEYTMHWVRQM |
| | PGKGLEWIGGINPNNGGTSY |
| | SPSFQGQVTISADKSISTAY |
| | LQWSSLKASDTAMYYCARGG |
| | SHYYAMDYWGQGTLVTVSS |
| | (SEQ ID NO: 1231) |
| 6G12V1-69 | QVQLVQSGAEVKKPGSSVKV |
| | SCKASGYTFTEYTMHWVRQA |
| | PGQGLEWIGGINPNNGGTSY |
| | SQKFQGRVTITADESTSTAY |
| | MELSSLRSEDTAVYYCARGG |
| | SHYYAMDYWGQGTLVTVSS |
| | (SEQ ID NO: 1232) |
| 6G12V3-23 | EVQLLESGGGLVQPGGSLRL |
| | SCAASGYTFTEYTMHWVRQA |
| | PGKGLEWIGGINPNNGGTSY |
| | SDSVKGRFTISRDNSKNTLY |
| | LQMNSLRAEDTAVYYCARGG |
| | SHYYAMDYWGQGTLVTVSS |
| | (SEQ ID NO: 1233) |
| 6G12V3-30 | QVQLVESGGGVVQPGRSLRL |
| | SCAASGYTFTEYTMHWVRQA |
| | PGKGLEWIGGINPNNGGTSY |
| | SDSVKGRFTISRDNSKNTLY |
| | LQMNSLRAEDTAVYYCARGG |
| | SHYYAMDYWGQGTLVTVSS |
| | (SEQ ID NO: 1234) |
| 6G12V3-48 | EVQLVESGGGLVQPGGSLRL |
| | SCAASGYTFTEYTMHWVRQA |
| | PGKGLEWIGGINPNNGGTSY |
| | SDSVKGRFTISRDNAKNSLY |
| | LQMNSLRAEDTAVYYCARGG |
| | SHYYAMDYWGQGTLVTVSS |
| | (SEQ ID NO: 1235) |
| 6G12V3-7 | EVQLVESGGGLVQPGGSLRL |
| | SCAASGYTFTEYTMHWVRQA |
| | PGKGLEWIGGINPNNGGTSY |
| | SDSVKGRFTISRDNAKNSLY |
| | LQMNSLRAEDTAVYYCARGG |
| | SHYYAMDYWGQGTLVTVSS |
| | (SEQ ID NO: 1235) |
| 6G12V4-59 | QVQLQESGPGLVKPSETLSL |
| | TCTVSGYTFTEYTMHWIRQP |
| | PGKGLEWIGGINPNNGGTSY |
| | SPSLKSRVTISVDTSKNQFS |
| | LKLSSVTAADTAVYYCARGG |
| | SHYYAMDYWGQGTLVTVSS |
| | (SEQ ID NO: 1236) |
| 6G12V3-15 | EVQLVESGGGLVKPGGSLRL |
| | SCAASGYTFTEYTMHWVRQA |
| | PGKGLEWIGGINPNNGGTSY |
| | SAPVKGRFTISRDDSKNTLY |
| | LQMNSLKTEDTAVYYCARGG |
| | SHYYAMDYWGQGTLVTVSS |
| | (SEQ ID NO: 1237) |
| 6G12V4-39 | QLQLQESGPGLVKPSETLSL |
| | TCTVSGYTFTEYTMHWIRQP |
| | PGKGLEWIGGINPNNGGTSY |
| | SPSLKSRVTISVDTSKNQFS |
| | LKLSSVTAADTAVYYCARGG |
| | SHYYAMDYWGQGTLVTVSS |
| | (SEQ ID NO: 1238) |
| Antibody 8E10 | Antibody 8E10 |
| 8E10V1-46 | QVQLVQSGAEVKKPGASVKV |
| | SCKASGYTFTDYEMHWVRQA |
| | PGQGLEWIGVIDPETGGTAY |
| | NQKFQGRVTMTRDTSTSTVY |
| | MELSSLRSEDTAVYYCTSPD |
| | YYGSSYPLYYAMDYWGQGTL |
| | VTVSS |
| | (SEQ ID NO: 1240) |
| 8E10V5-51 | EVQLVQSGAEVKKPGESLKI |
| | SCKGSGYTFTDYEMHWVRQM |
| | PGKGLEWIGVIDPETGGTAY |
| | NPSFQGQVTISADKSISTAY |
| | LQWSSLKASDTAMYYCTSPD |
| | YYGSSYPLYYAMDYWGQGTL |
| | VTVSS |
| | (SEQ ID NO: 1241) |
| 8E10V3-30 | QVQLVESGGGVVQPGRSLRL |
| | SCAASGYTFTDYEMHWVRQA |
| | PGKGLEWIGVIDPETGGTAY |
| | NDSVKGRFTISRDNSKNTLY |
| | LQMNSLRAEDTAVYYCTSPD |
| | YYGSSYPLYYAMDYWGQGTL |
| | VTVSS |
| | (SEQEDNO: 1242) |
| 8E10V3-23 | EVQLLESGGGLVQPGGSLRL |
| | SCAASGYTFTDYEMHWVRQA |
| | PGKGLEWIGVIDPETGGTAY |
| | NDSVKGRFTISRDNSKNTLY |
| | LQMNSLRAEDTAVYYCTSPD |
| | YYGSSYPLYYAMDYWGQGTL |
| | VTVSS |
| | (SEQ ID NO: 1243) |
| 8E10V1-69 | QVQLVQSGAEVKKPGSSVKV |
| | SCKASGYTFTDYEMHWVRQA |
| | PGQGLEWIGVIDPETGGTAY |
| | NQKFQGRVTITADESTSTAY |
| | MELSSLRSEDTAVYYCTSPD |
| | YYGSSYPLYYAMDYWGQGTL |
| | VTVSS |
| | (SEQ ID NO: 1244) |
| 8E10V3-48 | EVQLVESGGGLVQPGGSLRL |
| | SCAASGYTFTDYEMHWVRQA |
| | PGKGLEWIGVIDPETGGTAY |
| | NDSVKGRFTISRDNAKNSLY |
| | LQMNSLRAEDTAVYYCTSPD |
| | YYGSSYPLYYAMDYWGQGTL |
| | VTVSS |
| | (SEQ ID NO: 1245) |
| 8E10V3-7 | EVQLVESGGGLVQPGGSLRL |
| | SCAASGYTFTDYEMHWVRQA |
| | PGKGLEWIGVIDPETGGTAY |
| | NDSVKGRFTISRDNAKNSLY |
| | LQMNSLRAEDTAVYYCTSPD |
| | YYGSSYPLYYAMDYWGQGTL |
| | VTVSS |
| | (SEQ ID NO: 1245) |
| 8E10V4-59 | QVQLQESGPGLVKPSETLSL |
| | TCTVSGYTFTDYEMHWIRQP |
| | PGKGLEWIGVIDPETGGTAY |
| | NPSLKSRVTISVDTSKNQFS |
| | LKLSSVTAADTAVYYCTSPD |
| | YYGSSYPLYYAMDYWGQGTL |
| | VTVSS |
| | (SEQ ID NO: 1246) |
| 8E10V3-15 | EVQLVESGGGLVKPGGSLRL |
| | SCAASGYTFTDYEMHWVRQA |
| | PGKGLEWIGVIDPETGGTAY |
| | NAPVKGRFTISRDDSKNTLY |
| | LQMNSLKTEDTAVYYCTSPD |
| | YYGSSYPLYYAMDYWGQGTL |
| | VTVSS |
| | (SEQ ID NO: 1247) |
| 8E10V4-39 | QLQLQESGPGLVKPSETLSL |
| | TCTVSGYTFTDYEMHWIRQP |
| | PGKGLEWIGVIDPETGGTAY |
| | NPSLKSRVTISVDTSKNQFS |
| | LKLSSVTAADTAVYYCTSPD |
| | YYGSSYPLYYAMDYWGQGTL |
| | VTVSS |
| | (SEQ ID NO: 1248) |
| Antibody 7E5 | Antibody 7E5 |
| 7E5V3-15 | EVQLVESGGGLVKPGGSLRL |
| | SCAASGFTFSDAWMGWVRQA |
| | PGKGLEWVAEIRDKVKNHAT |
| | YYAAPVKGRFTISRDDSKNT |
| | LYLQMNSLKTEDTAVYYCRL |
| | GVFDYWGQGTLVTVSS |
| | (SEQ ID NO: 1250) |
| 7E5V3-7 | EVQLVESGGGLVQPGGSLRL |
| | SCAASGFTFSDAWMGWVRQA |
| | PGKGLEWVAEIRDKVKNHAT |
| | YYADSVKGRFTISRDNAKNS |
| | LYLQMNSLRAEDTAVYYCRL |
| | GVFDYWGQGTLVTVSS |
| | (SEQ ID NO: 1251) |
| 7E5V3-23 | EVQLLESGGGLVQPGGSLRL |
| | SCAASGFTFSDAWMGWVRQA |
| | PGKGLEWVAEIRDKVKNHAT |
| | YYADSVKGRFTISRDNSKNT |
| | LYLQMNSLRAEDTAVYYCRL |
| | GVFDYWGQGTLVTVSS |
| | (SEQ ID NO: 1252) |
| 7E5V3-48 | EVQLVESGGGLVQPGGSLRL |
| | SCAASGFTFSDAWMGWVRQA |
| | PGKGLEWVAEIRDKVKNHAT |
| | YYADSVKGRFTISRDNAKNS |
| | LYLQMNSLRAEDTAVYYCRL |
| | GVFDYWGQGTLVTVSS |
| | (SEQ ID NO: 1251) |
| 7E5V3-30 | QVQLVESGGGVVQPGRSLRL |
| | SCAASGFTFSDAWMGWVRQA |
| | PGKGLEWVAEIRDKVKNHAT |
| | YYADSVKGRFTISRDNSKNT |
| | LYLQMNSLRAEDTAVYYCRL |
| | GVFDYWGQGTLVTVSS |
| | (SEQ ID NO: 1253) |
| 7E5V1-69 | QVQLVQSGAEVKKPGSSVKV |
| | SCKASGFTFSDAWMGWVRQA |
| | PGQGLEWVAEIRDKVKNTIA |
| | TYYAQKFQGRVTITADESTS |
| | TAYMELSSLRSEDTAVYYCR |
| | LGVFDYWGQGTLVTVSS |
| | (SEQ ID NO: 1254) |
| 7E5V1-46 | QVQLVQSGAEVKKPGASVKV |
| | SCKASGFTFSDAWMGWVRQA |
| | PGQGLEWVAEIRDKVKNHAT |
| | YYAQKFQGRVTMTRDTSTST |
| | VYMELSSLRSEDTAVYYCRL |
| | GVFDYWGQGTLVTVSS |
| | (SEQ ID NO: 1255) |
| 7E5V5-51 | EVQLVQSGAEVKKPGESLKI |
| | SCKGSGFTFSDAWMGWVRQM |
| | PGKGLEWVAEIRDKVKNHAT |
| | YYAPSFQGQVTISADKSIST |
| | AYLQWSSLKASDTAMYYCRL |
| | GVFDYWGQGTLVTVSS |
| | (SEQ ID NO: 1256) |
| 7E5V4-59 | QVQLQESGPGLVKPSETLSL |
| | TCTVSGFTFSDAWMGWIRQP |
| | PGKGLEWVAEIRDKVKNHAT |
| | YYAPSLKSRVTISVDTSKNQ |
| | FSLKLSSVTAADTAVYYCRL |
| | GVFDYWGQGTLVTVSS |
| | (SEQ ID NO: 1257) |
| 7E5V4-39 | QLQLQESGPGLVKPSETLSL |
| | TCTVSGFTFSDAWMGWIRQP |
| | PGKGLEWVAEIRDKVKNHAT |
| | YYAPSLKSRVTISVDTSKNQ |
| | FSLKLSSVTAADTAVYYCRL |
| | GVFDYWGQGTLVTVSS |
| | (SEQ ID NO: 1258) |
| Antibody 7F8 | Antibody 7F8 |
| 7F8V3-15 | EVQLVESGGGLVKPGGSLRL |
| | SCAASGFSFNTYAMNWVRQA |
| | PGKGLEWIARIRSKSNNYAT |
| | YYAAPVKGRFTISRDDSKNT |
| | LYLQMNSLKTEDTAVYYCVR |
| | HGDGNLWYIDVWGQGTLVTV |
| | SS |
| | (SEQ ID NO: 1260) |
| 7F8V3-48 | EVQLVESGGGLVQPGGSLRL |
| | SCAASGFSFNTYAMNWVRQA |
| | PGKGLEWIARIRSKSNNYAT |
| | YYADSVKGRFTISRDNAKNS |
| | LYLQMNSLRAEDTAVYYCVR |
| | HGDGNLWYIDVWGQGTLVTV |
| | SS |
| | (SEQ ID NO: 1261) |
| 7F8V3-23 | EVQLLESGGGLVQPGGSLRL |
| | SCAASGFSFNTYAMNWVRQA |
| | PGKGLEWIARIRSKSNNYAT |
| | YYADSVKGRFTISRDNSKNT |
| | LYLQMNSLRAEDTAVYYCVR |
| | HGDGNLWYIDVWGQGTLVTV |
| | SS |
| | (SEQ ID NO: 1262) |
| 7F8V3-7 | EVQLVESGGGLVQPGGSLRL |
| | SCAASGFSFNTYAMNWVRQA |
| | PGKGLEWIARIRSKSNNYAT |
| | YYADSVKGRFTISRDNAKNS |
| | LYLQMNSLRAEDTAVYYCVR |
| | HGDGNLWYIDVWGQGTLVTV |
| | SS |
| | (SEQ ID NO: 1261) |
| 7F8V3-30 | OVQLVESGGGVVQPGRSLRL |
| | SCAASGFSFNTYAMNWVROA |
| | PGKGLEWIARIRSKSNNYAT |
| | YYADSVKGRFTISRDNSKNT |
| | LYLQMNSLRAEDTAVYYCVR |
| | HGDGNLWYIDVWGQGTLVTV |
| | SS |
| | (SEQ ID NO: 1263) |
| 7F8V1-69 | QVQLVQSGAEVKKPGSSVKV |
| | SCKASGFSFNTYAMNWVRQA |
| | PGQGLEWIARIRSKSNNYAT |
| | YYAQKFQGRVTITADESTST |
| | AYMELSSLRSEDTAVYYCVR |
| | HGDGNLWYIDVWGQGTLVTV |
| | SS |
| | (SEQ ID NO: 1264) |
| 7F8V5-51 | EVQLVQSGAEVKKPGESLKI |
| | SCKGSGFSFNTYAMNWVRQM |
| | PGKGLEWIARIRSKSNNYAT |
| | YYAPSFQGQVTISADKSIST |
| | AYLQWSSLKASDTAMYYCVR |
| | HGDGNLWYIDVWGQGTLVTV |
| | SS |
| | (SEQ ID NO: 1265) |
| 7F8V1-46 | QVQLVQSGAEVKKPGASVKV |
| | SCKASGFSFNTYAMNWVRQA |
| | PGQGLEWIARIRSKSNNYAT |
| | YYAQKFQGRVTMTRDTSTST |
| | VYMELSSLRSEDTAVYYCVR |
| | HGDGNLWYIDVWGQGTLVTV |
| | SS |
| | (SEQ ID NO: 1266) |
| 7F8V4-59 | QVQLQESGPGLVKPSETLSL |
| | TCTVSGFSFNTYAMNWIRQP |
| | PGKGLEWIARIRSKSNNYAT |
| | YYAPSLKSRVTISVDTSKNQ |
| | FSLKLSSVTAADTAVYYCVR |
| | HGDGNLWYIDVWGQGTLVTV |
| | SS |
| | (SEQ ID NO: 1267) |
| 7F8V4-30-4 | QVQLQESGPGLVKPSQTLSL |
| | TCTVSGFSFNTYAMNWIRQP |
| | PGKGLEWIARIRSKSNNYAT |
| | YYAPSLKSRVTISVDTSKNQ |
| | FSLKLSSVTAADTAVYYCVR |
| | HGDGNLWYIDVWGQGTLVTV |
| | SS |
| | (SEQ ID NO: 1268) |
| Antibody 8F8 | Antibody 8F8 |
| 8F8V1-46 | QVQLVQSGAEVKKPGASVKV |
| | SCKASGYTVSRYWMHWVRQA |
| | PGQGLEWIGRIDPNSGGTKY |
| | NQKFQGRVTMTRDTSTSTVY |
| | MELSSLRSEDTAVYYCVLTG |
| | TDFDYWGQGTLVTVSS |
| | (SEQ ID NO: 1270) |
| 8F8V3-23 | EVQLLESGGGLVQPGGSLRL |
| | SCAASGYTVSRYWMHWVRQA |
| | PGKGLEWIGRIDPNSGGTKY |
| | NDSVKGRFTISRDNSKNTLY |
| | LQMNSLRAEDTAVYYCVLTG |
| | TDFDYWGQGTLVTVSS |
| | (SEQ ID NO: 1271) |
| 8F8V1-69 | QVQLVQSGAEVKKPGSSVKV |
| | SCKASGYTVSRYWMHWVRQA |
| | PGOGLEWIGRIDPNSGGTK |
| | YNQKFQGRVTITADESTST |
| | AYMELSSLRSEDTAVYYCV |
| | LTGTDFDYWGQGTLVTVSS |
| | (SEQ ID NO: 1272) |
| 8F8V5-51 | EVQLVQSGAEVKKPGESLKI |
| | SCKGSGYTVSRYWMHWVRQM |
| | PGKGLEWIGRIDPNSGGTKY |
| | NPSFQGQVTISADKSISTAY |
| | LQWSSLKASDTAMYYCVLTG |
| | TDFDYWGQGTLVTVSS |
| | (SEQ ID NO: 1273) |
| 8F8V3-48 | EVQLVESGGGLVQPGGSLRL |
| | SCAASGYTVSRYWMHWVRQA |
| | PGKGLEWIGRIDPNSGGTKY |
| | NDSVKGRFTISRDNAKNSLY |
| | LQMNSLRAEDTAVYYCVLTG |
| | TDFDYWGQGTLVTVSS |
| | (SEQ ID NO: 1274) |
| 8F8V3-30 | QVQLVESGGGWQPGRSLRLS |
| | CAASGYTVSRYWMHWVRQAP |
| | GKGLEWIGRIDPNSGGTKYN |
| | DSVKGRFTISRDNSKNTLYL |
| | QMNSLRAEDTAVYYCVLTGT |
| | DFDYWGQGTLVTVSS |
| | (SEQ ID NO: 1275) |
| 8F8V3-7 | EVQLVESGGGLVQPGGSLRL |
| | SCAASGYTVSRYWMHWVRQA |
| | PGKGLEWIGRIDPNSGGTKY |
| | NDSVKGRFTISRDNAKNSLY |
| | LQMNSLRAEDTAVYYCVLTG |
| | TDFDYWGQGTLVTVSS |
| | (SEQ ID NO: 1274) |
| 8F8V4-59 | QVQLQESGPGLVKPSETLSL |
| | TCTVSGYTVSRYWMHWIRQP |
| | PGKGLEWIGRIDPNSGGTKY |
| | NPSLKSRVTISVDTSKNQFS |
| | LKLSSVTAADTAVYYCVLTG |
| | TDFDYWGQGTLVTVSS |
| | (SEQ ID NO: 1276) |
| 8F8V3-15 | EVQLVESGGGLVKPGGSLRL |
| | SCAASGYTVSRYWMHWVRQA |
| | PGKGLEWIGRIDPNSGGTKY |
| | NAPVKGRFTISRDDSKNTLY |
| | LQMNSLKTEDTAVYYCVLTG |
| | TDFDYWGQGTLVTVSS |
| | (SEQ ID NO: 1277) |
| 8F8V4-30-4 | QVQLQESGPGLVKPSQTLSL |
| | TCTVSGYTVSRYWMHWIRQP |
| | PGKGLEWIGRIDPNSGGTKY |
| | NPSLKSRVTISVDTSKNQFS |
| | LKLSSVTAADTAVYYCVLTG |
| | TDFDYWGQGTLVTVSS |
| | (SEQ ID NO: 1278) |
| Antibody 1H7 | Antibody 1H7 |
| 1H7V3-15 | EVQLVESGGGLVKPGGSLRL |
| | SCAASGFSFNTYAMNWVRQA |
| | PGKGLEWIARIRSKSNNYAT |
| | YYAAPVKGRFTISRDDSKNT |
| | LYLQMNSLKTEDTAVYYCVR |
| | HGDGNLWYIDVWGQGTLVTV |
| | SS |
| | (SEQ ID NO: 1260) |
| 1H7V3-23 | EVQLLESGGGLVQPGGSLRL |
| | SCAASGFSFNTYAMNWVRQA |
| | PGKGLEWIARIRSKSNNYAT |
| | YYADSVKGRFTISRDNSKNT |
| | LYLQMNSLRAEDTAVYYCVR |
| | HGDGNLWYIDVWGQGTLVTV |
| | SS |
| | (SEQ ID NO: 1262) |
| 1H7V3-48 | EVQLVESGGGLVQPGGSLRL |
| | SCAASGFSFNTYAMNWVRQA |
| | PGKGLEWIARIRSKSNNYAT |
| | YYADSVKGRFTISRDNAKNS |
| | LYLQMNSLRAEDTAVYYCVR |
| | HGDGNLWYIDVWGQGTLVTV |
| | SS |
| | (SEQ ID NO: 1261) |
| 1H7V3-7 | EVQLVESGGGLVQPGGSLRL |
| | SCAASGFSFNTYAMNWVRQA |
| | PGKGLEWIARIRSKSNNYAT |
| | YYADSVKGRFTISRDNAKNS |
| | LYLQMNSLRAEDTAVYYCVR |
| | HGDGNLWYIDVWGQGTLVTV |
| | SS |
| | (SEQ ID NO: 1261) |
| 1H7V3-30 | QVQLVESGGGWQPGRSLRLS |
| | CAASGFSFNTYAMNWVRQAP |
| | GKGLEWIARIRSKSNNYATY |
| | YADSVKGRFTISRDNSKNTL |
| | YLQMNSLRAEDTAVYYCVRH |
| | GDGNLWYIDVWGQGTLVTVS |
| | S |
| | (SEQ ID NO: 1263) |
| 1H7V5-51 | EVQLVQSGAEVKKPGESLKI |
| | SCKGSGFSFNTYAMNWVRQM |
| | PGKGLEWIARIRSKSNNYAT |
| | YYAPSFQGQVTISADKSIST |
| | AYLQWSSLKASDTAMYYCVR |
| | HGDGNLWYIDVWGQGTLVTV |
| | SS |
| | (SEQ ID NO: 1265) |
| 1H7V1-69 | QVQLVQSGAEVKKPGSSVKV |
| | SCKASGFSFNTYAMNWVRQA |
| | PGQGLEWIARIRSKSNNYAT |
| | YYAQKFQGRVTITADESTST |
| | AYMELSSLRSEDTAVYYCVR |
| | HGDGNLWYIDVWGQGTLVTV |
| | SS |
| | (SEQ ID NO: 1264) |
| 1H7V1-46 | QVQLVQSGAEVKKPGASVKV |
| | SCKASGFSFNTYAMNWVRQA |
| | PGQGLEWIARIRSKSNNYAT |
| | YYAQKFQGRVTMTRDTSTST |
| | VYMELSSLRSEDTAVYYCVR |
| | HGDGNLWYIDVWGQGTLVTV |
| | SS |
| | (SEQ ID NO: 1266) |
| 1H7V4-59 | QVQLQESGPGLVKPSETLSL |
| | TCTVSGFSFNTYAMNWIRQP |
| | PGKGLEWIARIRSKSNNYAT |
| | YYAPSLKSRVTISVDTSKNQ |
| | FSLKLSSVTAADTAVYYCVR |
| | HGDGNLWYIDVWGQGTLVTV |
| | SS |
| | (SEQ ID NO: 1267) |
| 1H7V4-30-4 | QVQLQESGPGLVKPSQTLSL |
| | TCTVSGFSFNTYAMNWIRQP |
| | PGKGLEWIARIRSKSNNYAT |
| | YYAPSLKSRVTISVDTSKNQ |
| | FSLKLSSVTAADTAVYYCVR |
| | HGDGNLWYIDVWGQGTLVTV |
| | SS |
| | (SEQ ID NO: 1268) |
| Antibody 2H8 | Antibody 2H8 |
| 2H8V3-15 | EVQLVESGGGLVKPGGSLRL |
| | SCAASGFSFNTYAMNWVRQA |
| | PGKGLEWIARIRSKSNNYAT |
| | YYAAPVKGRFTISRDDSKNT |
| | LYLQMNSLKTEDTAVYYCVR |
| | HGDGNLWYIDVWGQGTLVTV |
| | SS |
| | (SEQ ID NO: 1260) |
| 2H8V3-48 | EVQLVESGGGLVQPGGSLRL |
| | SCAASGFSFNTYAMNWVRQA |
| | PGKGLEWIARIRSKSNNYAT |
| | YYADSVKGRFTISRDNAKNS |
| | LYLQMNSLRAEDTAVYYCVR |
| | HGDGNLWYIDVWGQGTLVTV |
| | SS |
| | (SEQ ID NO: 1261) |
| 2H8V3-23 | EVQLLESGGGLVQPGGSLRL |
| | SCAASGFSFNTYAMNWVRQA |
| | PGKGLEWIARIRSKSNNYAT |
| | YYADSVKGRFTISRDNSKNT |
| | LYLQMNSLRAEDTAVYYCVR |
| | HGDGNLWYIDVWGQGTLVTV |
| | SS |
| | (SEQ ID NO: 1262) |
| 2H8V3-7 | EVQLVESGGGLVQPGGSLRL |
| | SCAASGFSFNTYAMNWVRQA |
| | PGKGLEWIARIRSKSNNYAT |
| | YYADSVKGRFTISRDNAKNS |
| | LYLQMNSLRAEDTAVYYCVR |
| | HGDGNLWYIDVWGQGTLVTV |
| | SS |
| | (SEQ ID NO: 1261) |
| 2H8V3-30 | QVQLVESGGGWQPGRSLRLS |
| | CAASGFSFNTYAMNWVRQAP |
| | GKGLEWIARIRSKSNNYAT |
| | YYADSVKGRFTISRDNSK |
| | NTLYLQMNSLRAEDTAVYYC |
| | VRHGDGNLWYIDVWGQGTLV |
| | TVSS |
| | (SEQ ID NO: 1263) |
| 2H8V5-51 | EVQLVQSGAEVKKPGESLKI |
| | SCKGSGFSFNTYAMNWVRQM |
| | PGKGLEWIARIRSKSNNYAT |
| | YYAPSFQGQVTISADKSIST |
| | AYLQWSSLKASDTAMYYCVR |
| | HGDGNLWYIDVWGQGTLVTV |
| | SS |
| | (SEQ ID NO: 1265) |
| 2H8V1-69 | QVQLVQSGAEVKKPGSSVKV |
| | SCKASGFSFNTYAMNWVRQA |
| | PGQGLEWIARIRSKSNNYAT |
| | YYAQKFQGRVTITADESTST |
| | AYMELSSLRSEDTAVYYCVR |
| | HGDGNLWYIDVWGQGTLVTV |
| | SS |
| | (SEQ ID NO: 1264) |
| 2H8V1-46 | QVQLVQSGAEVKKPGASVKV |
| | SCKASGFSFNTYAMNWVRQA |
| | PGQGLEWIARIRSKSNNYAT |
| | YYAQKFQGRVTMTRDTSTST |
| | VYMELSSLRSEDTAVYYCVR |
| | HGDGNLWYIDVWGQGTLVTV |
| | SS |
| | (SEQ ID NO: 1266) |
| 2H8V4-59 | QVQLQESGPGLVKPSETLSL |
| | TCTVSGFSFNTYAMNWIRQP |
| | PGKGLEWIARIRSKSNNYAT |
| | YYAPSLKSRVTISVDTSKNQ |
| | FSLKLSSVTAADTAVYYCVR |
| | HGDGNLWYIDVWGQGTLVTV |
| | SS |
| | (SEQ ID NO: 1267) |
| 2H8V4-30-4 | QVQLQESGPGLVKPSQTLSL |
| | TCTVSGFSFNTYAMNWIRQP |
| | PGKGLEWIARIRSKSNNYAT |
| | YYAPSLKSRVTISVDTSKNQ |
| | FSLKLSSVTAADTAVYYCVR |
| | HGDGNLWYIDVWGQGTLVTV |
| | SS |
| | (SEQ ID NO: 1268) |
| Antibody 3A2 | Antibody 3A2 |
| 3A2V5-51 | EVQLVQSGAEVKKPGESLKI |
| | SCKGSGYPFSNFWITWVRQM |
| | PGKGLEWIGDIYPGSDNSNY |
| | NPSFQGQVTISADKSISTAY |
| | LQWSSLKASDTAMYYCAREA |
| | YYTNPGFAYWGQGTLVTVSS |
| | (SEQ ID NO: 1282) |
| 3A2V1-69 | QVQLVQSGAEVKKPGSSVKV |
| | SCKASGYPFSNFWITWVRQA |
| | PGQGLEWIGDIYPGSDNSNY |
| | NQKFQGRVTITADESTSTAY |
| | MELSSLRSEDTAVYYCAREA |
| | YYTNPGFAYWGQGTLVTVSS |
| | (SEQ ID NO: 1283) |
| 3A2V1-46 | QVQLVQSGAEVKKPGASVKV |
| | SCKASGYPFSNFWITWVRQA |
| | PGQGLEWIGDIYPGSDNSNY |
| | NQKFQGRVTMTRDTSTSTVY |
| | MELSSLRSEDTAVYYCAREA |
| | YYTNPGFAYWGQGTLVTVSS |
| | (SEQ ID NO: 1284) |
| 3A2V3-48 | EVQLVESGGGLVQPGGSLRL |
| | SCAASGYPFSNFWITWVRQA |
| | PGKGLEWIGDIYPGSDNSNY |
| | NDSVKGRFTISRDNAKNSLY |
| | LQMNSLRAEDTAVYYCAREA |
| | YYTNPGFAYWGQGTLVTVSS |
| | (SEQ ID NO: 1285) |
| 3A2V3-30 | QVQLVESGGGWQPGRSLRLS |
| | CAASGYPFSNFWITWVRQAP |
| | GKGLEWIGDIYPGSDNSNYN |
| | DSVKGRFTISRDNSKNTLYL |
| | QMNSLRAEDTAVYYCAREAY |
| | YTNPGFAYWGQGTLVTVSS |
| | (SEQ ID NO: 1286) |
| 3A2V3-7 | EVQLVESGGGLVQPGGSLRL |
| | SCAASGYPFSNFWITWVRQA |
| | PGKGLEWIGDIYPGSDNSNY |
| | NDSVKGRFTISRDNAKNSLY |
| | LQMNSLRAEDTAVYYCAREA |
| | YYTNPGFAYWGQGTLVTVSS |
| | (SEQ ID NO: 1285) |
| 3A2V3-23 | EVQLLESGGGLVQPGGSLRL |
| | SCAASGYPFSNFWITWVRQA |
| | PGKGLEWIGDIYPGSDNSNY |
| | NDSVKGRFTISRDNSKNTLY |
| | LQMNSLRAEDTAVYYCAREA |
| | YYTNPGFAYWGQGTLVTVSS |
| | (SEQ ID NO: 1287) |
| 3A2V4-59 | QVQLQESGPGLVKPSETLSL |
| | TCTVSGYPFSNFWITWIRQP |
| | PGKGLEWIGDIYPGSDNSNY |
| | NPSLKSRVTISVDTSKNQFS |
| | LKLSSVTAADTAVYYCAREA |
| | YYTNPGFAYWGQGTLVTVSS |
| | (SEQ ID NO: 1288) |
| IGHV3-I5 | EVQLVESGGGLVKPGGSLRL |
| | SCAASGYPFSNFWITWVRQA |
| | PGKGLEWIGDIYPGSDNSNY |
| | NAPVKGRFTISRDDSKNTLY |
| | LQMNSLKTEDTAVYYCAREA |
| | YYTNPGFAYWGQGTLVTVSS |
| | (SEQ ID NO: 1289) |
| 3A2V4-39 | QLQLQESGPGLVKPSETLSL |
| | TCTVSGYPFSNFWITWIRQP |
| | PGKGLEWIGDIYPGSDNSNY |
| | NPSLKSRVTISVDTSKNQFS |
| | LKLSSVTAADTAVYYCAREA |
| | YYTNPGFAYWGQGTLVTVSS |
| | (SEQ ID NO: 1290) |
| Antibody 3A7 | Antibody 3A7 |
| 3A7V3-15 | EVQLVESGGGLVKPGGSLRL |
| | SCAASGFTFSDAWMGWVRQA |
| | PGKGLEWVAEIRDKVKNHAT |
| | YYAAPVKGRFTISRDDSKNT |
| | LYLQMNSLKTEDTAVYYCRL |
| | GVFDYWGQGTLVTVSS |
| | (SEQ ID NO: 1250) |
| 3A7V3-7 | EVQLVESGGGLVQPGGSLRL |
| | SCAASGFTFSDAWMGWVRQA |
| | PGKGLEWVAEIRDKVKNHAT |
| | YYADSVKGRFTISRDNAKNS |
| | LYLQMNSLRAEDTAVYYCRL |
| | GVFDYWGQGTLVTVSS |
| | (SEQ ID NO: 1251) |
| 3A7V3-23 | EVQLLESGGGLVQPGGSLRL |
| | SCAASGFTFSDAWMGWVROA |
| | PGKGLEWVAEIRDKVKNHAT |
| | YYADSVKGRFTISRDNSKNT |
| | LYLQMNSLRAEDTAVYYCRL |
| | GVFDYWGQGTLVTVSS |
| | (SEQ ID NO: 1252) |
| 3A7V3-48 | EVQLVESGGGLVQPGGSLRL |
| | SCAASGFTFSDAWMGWVRQA |
| | PGKGLEWVAEIRDKVKNHAT |
| | YYADSVKGRFTISRDNAKNS |
| | LYLQMNSLRAEDTAVYYCRL |
| | GVFDYWGQGTLVTVSS |
| | (SEQ ID NO: 4251) |
| 3A7V3-30 | QVQLVESGGGVVQPGRSLRL |
| | SCAASGFTFSDAWMGWVRQA |
| | PGKGLEWVAEIRDKVKNHAT |
| | YYADSVKGRFTISRDNSKNT |
| | LYLQMNSLRAEDTAVYYCRL |
| | GVFDYWGQGTLVTVSS |
| | (SEQ ID NO: 1253) |
| 3A7V1-69 | QVQLVQSGAEVKKPGSSVKV |
| | SCKASGFTFSDAWMGWVRQA |
| | PGQGLEWVAEIRDKVKNHAT |
| | YYAQKFQGRVTITADESTST |
| | AYMELSSLRSEDTAVYYCRL |
| | GVFDYWGQGTLVTVSS |
| | (SEQ ID NO: 1254) |
| 3A7V1-46 | QVQLVQSGAEVKKPGASVKV |
| | SCKASGFTFSDAWMGWVRQA |
| | PGQGLEWVAEIRDKVKNHAT |
| | YYAQKFQGRVTMTRDTSTST |
| | VYMELSSLRSEDTAVYYCRL |
| | GVTDYWGQGTLVTVSS |
| | (SEQ ID NO: 1255) |
| 3A7V5-51 | EVQLVQSGAEVKKPGESLKI |
| | SCKGSGFTFSDAWMGWVRQM |
| | PGKGLEWVAEIRDKVKNHAT |
| | YYAPSFQGQVTISADKSIST |
| | AYLQWSSLKASDTAMYYCRL |
| | GVFDYWGQGTLVTVSS |
| | (SEQ ID NO: 1256) |
| 3A7V4-59 | QVQLQESGPGLVKPSETLSL |
| | TCTVSGFTFSDAWMGWIRQP |
| | PGKGLEWVAEIRDKVKNHAT |
| | YYAPSLKSRVTISVDTSKNQ |
| | FSLKLSSVTAADTAVYYCRL |
| | GVFDYWGQGTLVTVSS |
| | (SEQ ID NO: 1257) |
| 3A7V4-39 | QLQLQESGPGLVKPSETLSL |
| | TCTVSGFTFSDAWMGWIRQP |
| | PGKGLEWVAEIRDKVKNHAT |
| | YYAPSLKSRVTISVDTSKNQ |
| | FSLKLSSVTAADTAVYYCRL |
| | GVFDYWGQGTLVTVSS |
| | (SEQ ID NO: 1258) |
| Antibody 3B10 | Antibody 3B10 |
| 3B10V3-15 | EVQLVESGGGLVKPGGSLRL |
| | SCAASGLTSNTYTQTWVRQA |
| | PGKGLEWESVIRSKSNNFST |
| | LYAAPVKGRFTISRDDSKNT |
| | LYLQMNSLKTEDTAVYYCVR |
| | HKSNRYPGVYWGQGTLVTVS |
| | S |
| | (SEQ ID NO: 1292) |
| 3B10V3-30 | QVQLVESGGGWQPGRSLRLS |
| | CAASGLTSNTYTQTWVROAP |
| | GKGLEWESVIRSKSNNFSTL |
| | YADSVKGRFTISRDNSKNTL |
| | YLQMNSLRAEDTAVYYCVRH |
| | KSNRYPGVYWGQGTLVTVSS |
| | (SEQ ID NO: 1293) |
| 3B 10V3-23 | EVQLLESGGGLVQPGGSLRL |
| | SCAASGLTSNTYTQTWVRQA |
| | PGKGLEWESVIRSKSNNFST |
| | LYADSVKGRFTISRDNSKNT |
| | LYLQMNSLRAEDTAVYYCVR |
| | HKSNRYPGVYWGQGTLVTVS |
| | S |
| | (SEQ ID NO: 1294) |
| 3B10V1-46 | QVQLVQSGAEVKKPGASVKV |
| | SCKASGLTSNTYTQTWVRQA |
| | PGQGLEWESVIRSKSNNFST |
| | LYAQKFQGRVTMTRDTSTST |
| | VYMELSSLRSEDTAVYYCVR |
| | HKSNRYPGVYWGQGTLVTVS |
| | S |
| | (SEQ ID NO: 1295) |
| 3B10V3-48 | EVQLVESGGGLVQPGGSLRL |
| | SCAASGLTSNTYTQTWVRQA |
| | PGKGLEWESVIRSKSNNFST |
| | LYADSVKGRFTISRDNAKNS |
| | LYLQMNSLRAEDTAVYYCVR |
| | HKSNRYPGVYWGQGTLVTVS |
| | S |
| | (SEQ ID NO: 1296) |
| 3B10V1-69 | QVQLVQSGAEVKKPGSSVKV |
| | SCKASGLTSNTYTQTWVRQA |
| | PGQGLEWESVIRSKSNNFST |
| | LYAQKFQGRVTITADESTST |
| | AYMELSSLRSEDTAVYYCVR |
| | HKSNRYPGVYWGQGTLVTVS |
| | S |
| | (SEQ ID NO: 1297) |
| 3B10V3-7 | EVQLVESGGGLVQPGGSLRL |
| | SCAASGLTSNTYTQTWVRQA |
| | PGKGLEWESVIRSKSNNFST |
| | LYADSVKGRFTISRDNAKNS |
| | LYLQMNSLRAEDTAVYYCVR |
| | HKSNRYPGVYWGQGTLVTVS |
| | S |
| | (SEQ ID NO: 1296) |
| 3B10V5-51 | EVQLVQSGAEVKKPGESLKI |
| | SCKGSGLTSNTYTQTWVRQM |
| | PGKGLEWESVIRSKSNNFST |
| | LYAPSFQGQVTISADKSIST |
| | AYLQWSSLKASDTAMYYCVR |
| | HKSNRYPGVYWGQGTLVTVS |
| | S |
| | (SEQ ID NO: 1298) |
| 3B10V4-59 | QVQLQESGPGLVKPSETLSL |
| | TCTVSGLTSNTYTQTWIRQP |
| | PGKGLEWESVIRSKSNNFST |
| | LYAPSLKSRVTISVDTSKNQ |
| | FSLKLSSVTAADTAVYYCVR |
| | HKSNRYPGVYWGQGTLVTVS |
| | S |
| | (SEQ ID NO: 1299) |
| 3B10V4-39 | QLQLQESGPGLVKPSETLSL |
| | TCTVSGLTSNTYTQTWIRQP |
| | PGKGLEWESVIRSKSNNFST |
| | LYAPSLKSRVTISVDTSKNQ |
| | FSLKLSSVTAADTAVYYCVR |
| | HKSNRYPGVYWGQGTLVTVS |
| | S |
| | (SEQ ID NO: 1300) |
| Antibody 4F11 | Antibody 4F11 |
| 4F11V5-51 | EVQLVQSGAEVKKPGESLKI |
| | SCKGSGYPFSNFWITWVRQM |
| | PGKGLEWIGDIYPGSDNSNY |
| | NPSFQGQVTISADKSISTAY |
| | LQWSSLKASDTAMYYCAREA |
| | YYTNPGFAYWGQGTLVTVSS |
| | (SEQ ID NO: 1282) |
| 4F11V1-69 | QVQLVQSGAEVKKPGSSVKV |
| | SCKASGYPFSNFWITWVRQA |
| | PGQGLEWIGDIYPGSDNSNY |
| | NQKFQGRVTITADESTSTAY |
| | MELSSLRSEDTAVYYCAREA |
| | YYTNPGFAYWGQGTLVTVSS |
| | (SEQ ID NO: 1283) |
| 4F11V1-46 | QVQLVQSGAEVKKPGASVKV |
| | SCKASGYPFSNFWTTWVRQA |
| | PGQGLEWIGDIYPGSDNSNY |
| | NQKFQGRVTMTRDTSTSTVY |
| | MELSSLRSEDTAVYYCAREA |
| | YYTNPGFAYWGQGTLVTVSS |
| | (SEQ ID NO: 1284) |
| 4F11V3-48 | EVQLVESGGGLVQPGGSLRL |
| | SCAASGYPFSNFWITWVRQA |
| | PGKGLEWIGDIYPGSDNSNY |
| | NDSVKGRFTISRDNAKNSLY |
| | LQMNSLRAEDTAVYYCAREA |
| | YYTNPGFAYWGQGTLVTVSS |
| | (SEQ ID NO: 1285) |
| 4F11V3-30 | QVQLVESGGGVVQPGRSLRL |
| | SCAASGYPFSNFWITWVRQA |
| | PGKGLEWIGDIYPGSDNSNY |
| | NDSVKGRFTISRDNSKNTLY |
| | LQMNSLRAEDTAVYYCAREA |
| | YYTNPGFAYWGQGTLVTVSS |
| | (SEQ ID NO: 1286) |
| 4F11V3-7 | EVQLVESGGGLVQPGGSLRL |
| | SCAASGYPFSNFWITWVRQA |
| | PGKGLEWIGDIYPGSDNSNY |
| | NDSVKGRFTISRDNAKNSLY |
| | LQMNSLRAEDTAVYYCAREA |
| | YYTNPGFAYWGQGTLVTVSS |
| | (SEQ ID NO: 1285) |
| 4F11V3-23 | EVQLLESGGGLVQPGGSLRL |
| | SCAASGYPFSNFWITWVRQA |
| | PGKGLEWIGDIYPGSDNSNY |
| | NDSVKGRFTISRDNSKNTLY |
| | LQMNSLRAEDTAVYYCAREA |
| | YYTNPGFAYWGQGTLVTVSS |
| | (SEQ ID NO: 1287) |
| 4F11V4-59 | QVQLQESGPGLVKPSETLSL |
| | TCTVSGYPFSNFWITWIRQP |
| | PGKGLEWIGDIYPGSDNSNY |
| | NPSLKSRVTISVDTSKNQFS |
| | LKLSSVTAADTAVYYCAREA |
| | YYTNPGFAYWGQGTLVTVSS |
| | (SEQ ID NO: 1288) |
| 4F11V3-15 | EVQLVESGGGLVKPGGSLRL |
| | SCAASGYPFSNFWITWVRQA |
| | PGKGLEWIGDIYPGSDNSNY |
| | NAPVKGRFTISRDDSKNTLY |
| | LQMNSLKTEDTAVYYCAREA |
| | YYTNPGFAYWGQGTLVTVSS |
| | (SEQ ID NO: 1289) |
| 4F11V4-39 | QLQLQESGPGLVKPSETLSL |
| | TCTVSGYPFSNFWITWIRQP |
| | PGKGLEWIGDIYPGSDNSNY |
| | NPSLKSRVTISVDTSKNQFS |
| | LKLSSVTAADTAVYYCAREA |
| | YYTNPGFAYWGQGTLVTVSS |
| | (SEQ ID NO: 1290) |
| Antibody 6H6 | Antibody 6H6 |
| 6H6V3-15 | EVQLVESGGGLVKPGGSLRL |
| | SCAASGFTFSDAWMDWVRQA |
| | PGKGLEWWVAEIRNKVNNHA |
| | TYYAPVKGRFTISRDDSKNT |
| | LYLQMNSLKTEDTAVYYCCT |
| | SLYDGYYLRFAWGQGTLVTV |
| | SS |
| | (SEQ ID NO: 1302) |
| 6H6V3-7 | EVQLVESGGGLVQPGGSLRL |
| | SCAASGFTFSDAWMDWVRQA |
| | PGKGLEWWVAEIRNKVNNHA |
| | TYYDSVKGRFTISRDNAKNS |
| | LYLQMNSLRAEDTAVYYCCT |
| | SLYDGYYLRFAWGQGTLVTV |
| | SS |
| | (SEQ ID NO: 1303) |
| 6H6V3-23 | EVQLLESGGGLVQPGGSLRL |
| | SCAASGFTFSDAWMDWVRQA |
| | PGKGLEWWVAEIRNKVNNHA |
| | TYYDSVKGRFTISRDNSKNT |
| | LYLQMNSLRAEDTAVYYCCT |
| | SLYDGYYLRFAWGQGTLVTV |
| | SS |
| | (SEQ ID NO: 1304) |
| 6H6V3-48 | EVQLVESGGGLVQPGGSLRL |
| | SCAASGFTFSDAWMDWVRQA |
| | PGKGLEWWVAEIRNKVNNHA |
| | TYYDSVKGRFTISRDNAKNS |
| | LYLQMNSLRAEDTAVYYCCT |
| | SLYDGYYLRFAWGQGTLVTV |
| | SS |
| | (SEQ ID NO: 1303) |
| 6H6V3-30 | QVQLVESGGGWQPGRSLRLS |
| | CAASGFTFSDAWMDWVRQAP |
| | GKGLEWWVAEIRNKVNNHAT |
| | YYDSVKGRFTISRDNSKNTL |
| | YLQMNSLRAEDTAVYYCCTS |
| | LYDGYYLRFAWGQGTLVTVS |
| | S |
| | (SEQ ID NO: 1305) |
| 6H6V1-46 | QVQLVQSGAEVKKPGASVKV |
| | SCKASGFTFSDAWMDWVRQA |
| | PGQGLEWWVAEIRNKVNNHA |
| | TYYQKFQGRVTMTRDTSTST |
| | VYMELSSLRSEDTAVYYCCT |
| | SLYDGYYLRFAWGQGTLVTV |
| | SS |
| | (SEQ ID NO: 1306) |
| 6H6V1-69 | QVQLVQSGAEVKKPGSSVKV |
| | SCKASGFTFSDAWMDWVRQA |
| | PGQGLEWWVAEIRNKVNNHA |
| | TYYQKFQGRVTITADESTST |
| | AYMELSSLRSEDTAVYYCCT |
| | SLYDGYYLRFAWGQGTLVTV |
| | SS |
| | (SEQ ID NO: 1307) |
| 6H6V5-51 | EVQLVQSGAEVKKPGESLKI |
| | SCKGSGFTFSDAWMDWVRQM |
| | PGKGLEWWVAEIRNKVNNHA |
| | TYYPSFQGQVTISADKSIST |
| | AYLQWSSLKASDTAMYYCCT |
| | SLYDGYYLRFAWGQGTLVTV |
| | SS |
| | (SEQ ID NO: 1308) |
| 6H6V4-59 | QVQLQESGPGLVKPSETLSL |
| | TCTVSGFTFSDAWMDWIRQP |
| | PGKGLEWWVAEIRNKVNNHA |
| | TYYPSLKSRVTISVDTSKNQ |
| | FSLKLSSVTAADTAVYYCCT |
| | SLYDGYYLRFAWGQGTLVTV |
| | SS |
| | (SEQ ID NO: 1309) |
| 6H6V4-39 | QLQLQESGPGLVKPSETLSL |
| | TCTVSGFTFSDAWMDWIRQP |
| | PGKGLEWWVAEIRNKVNNHA |
| | TYYPSLKSRVTISVDTSKNQ |
| | FSLKLSSVTAADTAVYYCCT |
| | SLYDGYYLRFAWGQGTLVTV |
| | SS |
| | (SEQ ID NO: 1310) |
| Antibody 7A9 | Antibody 7A |
| 7A9V3-15 | EVQLVESGGGLVKPGGSLRL |
| | SCAASGFTFNTYSMNWVRQA |
| | PGKGLEWVAHIKTKZNNFAT |
| | FYAAPVKGRFTISRDDSKNT |
| | LYLQMNSLKTEDTAVYYCVZ |
| | HZSNNYPFAYWGQGTLVTVS |
| | S |
| | (SEQ ID NO: 1312) |
| 7A9V3-48 | EVQLVESGGGLVQPGGSLRL |
| | SCAASGFTFNTYSMNWVRQA |
| | PGKGLEWVAHIKTKZNNFAT |
| | FYADSVKGRFTISRDNAKNS |
| | LYLQMNSLRAEDTAVYYCVZ |
| | HZSNNYPFAYWGQGTLVTVS |
| | S |
| | (SEQ ID NO: 1313) |
| 7A9V3-23 | EVQLLESGGGLVQPGGSLRL |
| | SCAASGFTFNTYSMNWVRQA |
| | PGKGLEWVAHIKTKZNNFAT |
| | FYADSVKGRFTISRDNSKNT |
| | LYLQMNSLRAEDTAVYYCVZ |
| | HZSNNYPFAYWGQGTLVTVS |
| | S |
| | (SEQ ID NO: 1314) |
| 7A9V3-7 | EVQLVESGGGLVQPGGSLRL |
| | SCAASGFTFNTYSMNWVRQA |
| | PGKGLEWVAHIKTKZNNFAT |
| | FYADSVKGRFTISRDNAKNS |
| | LYLQMNSLRAEDTAVYYCVZ |
| | HZSNNYPFAYWGQGTLVTVS |
| | S |
| | (SEQ ID NO: 1313) |
| 7A9V3-30 | QVQLVESGGGWQPGRSLRLS |
| | CAASGFTFNTYSMNWVRQAP |
| | GKGLEWVAHIKTKZNNFATF |
| | YADSVKGRFTISRDNSKNTL |
| | YLQMNSLRAEDTAVYYCVZH |
| | ZSNNYPFAYWGQGTLVTVSS |
| | (SEQ ID NO: 1315) |
| 7A9V1-46 | QVQLVQSGAEVKKPGASVKV |
| | SCKASGFTFNTYSMNWVRQA |
| | PGQGLEWVAHIKTKZNNFAT |
| | FYAQKFQGRVTMTRDTSTST |
| | VYMELSSLRSEDTAVYYCVZ |
| | HZSNNYPFAYWGQGTLVTVS |
| | S |
| | (SEQ ID NO: 1316) |
| 7A9V1-69 | QVQLVQSGAEVKKPGSSVKV |
| | SCKASGFTFNTYSMNWVRQA |
| | PGQGLEWVAHIKTKZNNFAT |
| | FYAQKFQGRVTITADESTST |
| | AYMELSSLRSEDTAVYYCVZ |
| | HZSNNYPFAYWGQGTLVTVS |
| | S |
| | (SEQ ID NO: 1317) |
| 7A9V5-51 | EVQLVQSGAEVKKPGESLKI |
| | SCKGSGFTFNTYSMNWVRQM |
| | PGKGLEWVAHIKTKZNNFAT |
| | FYAPSFQGQVTISADKSIST |
| | AYLQWSSLKASDTAMYYCVZ |
| | HZSNNYPFAYWGQGTLVTVS |
| | S |
| | (SEQ ID NO: 1318) |
| 7A9V4-59 | QVQLQESGPGLVKPSETLSL |
| | TCTVSGFTFNTYSMNWIRQP |
| | PGKGLEWVAHIKTKZNNFAT |
| | FYAPSLKSRVTISVDTSKNQ |
| | FSLKLSSVTAADTAVYYCVZ |
| | HZSNNYPFAYWGQGTLVTVS |
| | S |
| | (SEQ ID NO: 1319) |
| 7A9V4-30-4 | QVQLQESGPGLVKPSQTLSL |
| | TCTVSGFTFNTYSMNWIRQP |
| | PGKGLEWVAHIKTKZNNFAT |
| | FYAPSLKSRVTISVDTSKNQ |
| | FSLKLSSVTAADTAVYYCVZ |
| | HZSNNYPFAYWGQGTLVTVS |
| | S |
| | (SEQ ID NO: 1320) |
| Antibody 7B3 | Antibody 7B3 |
| 7B3V1-46 | QVQLVQSGAEVKKPGASVKV |
| | SCKASGYTFTTYWIHWVRQA |
| | PGQGLEWIGRNDPNSGGSNY |
| | NQKFQGRVTMTRDTSTSTVY |
| | MELSSLRSEDTAVYYCVRTN |
| | WDGDFWGQGTLVTVSS |
| | (SEQ ID NO: 1322) |
| 7B3V5-51 | EVQLVQSGAEVKKPGESLKI |
| | SCKGSGYTFTTYWIHWVRQM |
| | PGKGLEWIGRNDPNSGGSNY |
| | NPSFQGQVTISADKSISTAY |
| | LQWSSLKASDTAMYYCVRTN |
| | WDGDFWGQGTLVTVSS |
| | (SEQ ID NO: 1323) |
| 7B3V1-69 | QVQLVQSGAEVKKPGSSVKV |
| | SCKASGYTFTTYWIHWVRQA |
| | PGQGLEWIGRNDPNSGGSNY |
| | NQKFQGRVTITADESTSTAY |
| | MELSSLRSEDTAVYYCVRTN |
| | WDGDFWGQGTLVTVSS |
| | (SEQ ID NO: 1324) |
| 7B3V3-23 | EVQLLESGGGLVQPGGSLRL |
| | SCAASGYTFTTYWIHWVRQA |
| | PGKGLEWIGRNDPNSGGSNY |
| | NDSVKGRFTISRDNSKNTLY |
| | LQMNSLRAEDTAVYYCVRTN |
| | WDGDFWGQGTLVTVSS |
| | (SEQ ID NO: 1325) |
| 7B3V3-7 | EVQLVESGGGLVQPGGSLRL |
| | SCAASGYTFTTYWIHWVRQA |
| | PGKGLEWIGRNDPNSGGSNY |
| | NDSVKGRFTISRDNAKNSLY |
| | LQMNSLRAEDTAVYYCVRTN |
| | WDGDFWGQGTLVTVSS |
| | (SEQ ID NO: 1326) |
| 7B3V3-30 | QVQLVESGGGWQPGRSLRLS |
| | CAASGYTFTTYWIHWVRQAP |
| | GKGLEWIGRNDPNSGGSNYN |
| | DSVKGRFTISRDNSKNTLYL |
| | QMNSLRAEDTAVYYCVRTNW |
| | DGDFWGQGTLVTVSS |
| | (SEQ ID NO: 1327) |
| 7B3V3-48 | EVQLVESGGGLVQPGGSLRL |
| | SCAASGYTFTTYWIHWVRQA |
| | PGKGLEWIGRNDPNSGGSNY |
| | NDSVKGRFTISRDNAKNSLY |
| | LQMNSLRAEDTAVYYCVRTN |
| | WDGDFWGQGTLVTVSS |
| | (SEQ ID NO: 1326) |
| 7B3V4-59 | QVQLQESGPGLVKPSETLSL |
| | TCTVSGYTFTTYWIHWIRQP |
| | PGKGLEWIGRNDPNSGGSNY |
| | NPSLKSRVTISVDTSKNQFS |
| | LKLSSVTAADTAVYYCVRTN |
| | WDGDFWGQGTLVTVSS |
| | (SEQ ID NO: 1328) |
| 7B3V3-15 | EVQLVESGGGLVKPGGSLRL |
| | SCAASGYTFTTYWIHWVRQA |
| | PGKGLEWIGRNDPNSGGSNY |
| | NAPVKGRFTISRDDSKNTLY |
| | LQMNSLKTEDTAVYYCVRTN |
| | WDGDFWGQGTLVTVSS |
| | (SEQ ID NO: 1329) |
| 7B3V4-30-4 | QVQLQESGPGLVKPSQTLSL |
| | TCTVSGYTFTTYWIHIRQPP |
| | GKGLEWIGRNDPNSGGSNYN |
| | PSLKSRVTISVDTSKNQFSL |
| | KLSSVTAADTAVYYCVRTNW |
| | DGDFWGQGTLVTVSS |
| | (SEQ ID NO: 1330) |
| Antibody 8A1 | Antibody 8A1 |
| 8A1V5-51 | EVQLVQSGAEVKKPGESLKI |
| | SCKGSGYAFSNYWMSWVRQM |
| | PGKGLEWIGQIYPGDGDTKY |
| | NPSFQGQVTISADKSISTAY |
| | LQWSSLKASDTAMYYCSREK |
| | GADYYGSTYSAWFSYWGQGT |
| | LVTVSS |
| | (SEQ ID NO: 1332) |
| 8A1V1-46 | QVQLVQSGAEVKKPGASVKV |
| | SCKASGYAFSNYWMSWVRQA |
| | PGQGLEWIGQIYPGDGDTKY |
| | NQKFQGRVTMTRDTSTSTVY |
| | MELSSLRSEDTAVYYCSREK |
| | GADYYGSTYSAWFSYWGQGT |
| | LVTVSS |
| | (SEQ ID NO: 1333) |
| 8A1V3-23 | EVQLLESGGGLVQPGGSLRL |
| | SCAASGYAFSNYWMSWVRQA |
| | PGKGLEWIGQIYPGDGDTKY |
| | NDSVKGRFTISRDNSKNTLY |
| | LQMNSLRAEDTAVYYCSREK |
| | GADYYGSTYSAWFSYWGQGT |
| | LVTVSS |
| | (SEQ ID NO: 1334) |
| 8A1V1-69 | QVQLVQSGAEVKKPGSSVKV |
| | SCKASGYAFSNYWMSWVRQA |
| | PGQGLEWIGQIYPGDGDTKY |
| | NQKFQGRVTITADESTSTAY |
| | MELSSLRSEDTAVYYCSREK |
| | GADYYGSTYSAWFSYWGQGT |
| | LVTVSS |
| | (SEQ ID NO: 1335) |
| 8A1V3-7 | EVQLVESGGGLVQPGGSLRL |
| | SCAASGYAFSNYWMSWVRQA |
| | PGKGLEWIGQIYPGDGDTKY |
| | NDSVKGRFTISRDNAKNSLY |
| | LQMNSLRAEDTAVYYCSREK |
| | GADYYGSTYSAWFSYWGQGT |
| | LVTVSS |
| | (SEQ ID NO: 1336) |
| 8A1V3-48 | EVQLVESGGGLVQPGGSLRL |
| | SCAASGYAFSNYWMSWVRQA |
| | PGKGLEWIGQIYPGDGDTKY |
| | NDSVKGRFTISRDNAKNSLY |
| | LQMNSLRAEDTAVYYCSREK |
| | GADYYGSTYSAWFSYWGQGT |
| | LVTVSS |
| | (SEQ ID NO: 1336) |
| 8A1V3-30 | QVQLVESGGGVVQPGRSLRL |
| | SCAASGYAFSNYWMSWVRQA |
| | PGKGLEWIGQIYPGDGDTKY |
| | NDSVKGRFTISRDNSKNTLY |
| | LQMNSLRAEDTAVYYCSREK |
| | GADYYGSTYSAWFSYWGQGT |
| | LVTVSS |
| | (SEQ ID NO: 1337) |
| 8A1V4-59 | QVQLQESGPGLVKPSETLSL |
| | TCTVSGYAFSNYWMSWIRQP |
| | PGKGLEWIGQIYPGDGDTKY |
| | NPSLKSRVTISVDTSKNQFS |
| | LKLSSVTAADTAVYYCSREK |
| | GADYYGSTYSAWFSYWGQGT |
| | LVTVSS |
| | (SEQ ID NO: 1338) |
| 8A1V3-15 | EVQLVESGGGLVKPGGSLRL |
| | SCAASGYAFSNYWMSWVRQA |
| | PGKGLEWIGQIYPGDGDTKY |
| | NAPVKGRFTISRDDSKNTLY |
| | LQMNSLKTEDTAVYYCSREK |
| | GADYYGSTYSAWFSYWGQGT |
| | LVTVSS |
| | (SEQ ID NO: 1339) |
| 8A1V4-30-4 | QVQLQESGPGLVKPSQTLSL |
| | TCTVSGYAFSNYWMSWIRQP |
| | PGKGLEWIGQIYPGDGDTKY |
| | NPSLKSRVTISVDTSKNQFS |
| | LKLSSVTAADTAVYYCSREK |
| | GADYYGSTYSAWFSYWGQGT |
| | LVTVSS |
| | (SEQ ID NO: 1340) |
| Antibody 9F5 | Antibody 9F5 |
| 9F5V5-51 | EVQLVQSGAEVKKPGESLKI |
| | SCKGSGYAFSSSWMNWVRQM |
| | PGKGLEWIGRIYPGDGDTNY |
| | NPSFQGQVTISADKSISTAY |
| | LQWSSLKASDTAMYYCARLL |
| | RNQPGESYAMDYWGQGTLVT |
| | VSS |
| | (SEQ ID NO: 1342) |
| 9F5V1-46 | QVQLVQSGAEVKKPGASVKV |
| | SCKASGYAFSSSWMNWVRQA |
| | PGQGLEWIGRIYPGDGDTNY |
| | NQKFQGRVTMTRDTSTSTVY |
| | MELSSLRSEDTAVYYCARLL |
| | RNQPGESYAMDYWGQGTLVT |
| | VSS |
| | (SEQ ID NO: 1343) |
| 9F5V1-69 | QVQLVQSGAEVKKPGSSVKV |
| | SCKASGYAFSSSWMNWVRQA |
| | PGQGLEWIGRIYPGDGDTNY |
| | NQKFQGRVTITADESTSTAY |
| | MELSSLRSEDTAVYYCARLL |
| | RNQPGESYAMDYWGQGTLVT |
| | VSS |
| | (SEQ ID NO: 1344) |
| 9F5V3-23 | EVQLLESGGGLVQPGGSLRL |
| | SCAASGYAFSSSWMNWVRQA |
| | PGKGLEWIGRIYPGDGDTNY |
| | NDSVKGRFTISRDNSKNTLY |
| | LQMNSLRAEDTAVYYCARLL |
| | RNQPGESYAMDYWGQGTLVT |
| | VSS |
| | (SEQ ID NO: 1345) |
| 9F5V3-7 | EVQLVESGGGLVQPGGSLRL |
| | SCAASGYAFSSSWMNWVRQA |
| | PGKGLEWIGRIYPGDGDTNY |
| | NDSVKGRFTISRDNAKNSLY |
| | LQMNSLRAEDTAVYYCARLL |
| | RNQPGESYAMDYWGQGTLVT |
| | VSS |
| | (SEQ ID NO: 1346) |
| 9F5V3-48 | EVQLVESGGGLVQPGGSLRL |
| | SCAASGYAFSSSWMNWVRQA |
| | PGKGLEWIGRIYPGDGDTNY |
| | NDSVKGRFTISRDNAKNSLY |
| | LQMNSLRAEDTAVYYCARLL |
| | RNQPGESYAMDYWGQGTLVT |
| | VSS |
| | (SEQ ID NO: 1346) |
| 9F5V3-30 | QVQLVESGGGVVQPGRSLRL |
| | SCAASGYAFSSSWMNWVRQA |
| | PGKGLEWIGRIYPGDGDTNY |
| | NDSVKGRFTISRDNSKNTLY |
| | LQMNSLRAEDTAVYYCARLL |
| | RNQPGESYAMDYWGQGTLVT |
| | VSS |
| | (SEQ ID NO: 1347) |
| 9F5V4-59 | QVQLQESGPGLVKPSETLSL |
| | TCTVSGYAFSSSWMNWIRQP |
| | PGKGLEWIGRIYPGDGDTNY |
| | NPSLKSRVTISVDTSKNQFS |
| | LKLSSVTAADTAVYYCARLL |
| | RNQPGESYAMDYWGQGTLVT |
| | VSS |
| | (SEQ ID NO: 1348) |
| 9F5V3-I5 | EVQLVESGGGLVKPGGSLRL |
| | SCAASGYAFSSSWMNWVRQA |
| | PGKGLEWIGRIYPGDGDTNY |
| | NAPVKGRFTISRDDSKNTLY |
| | LQMNSLKTEDTAVYYCARLL |
| | RNQPGESYAMDYWGQGTLVT |
| | VSS |
| | (SEQ ID NO: 1349) |
| 9F5V4-30-4 | QVQLQESGPGLVKPSQTLSL |
| | TCTVSGYAFSSSWMNWIRQP |
| | PGKGLEWIGRIYPGDGDTNY |
| | NPSLKSRVTISVDTSKNQFS |
| | LKLSSVTAADTAVYYCARLL |
| | RNQPGESYAMDYWGQGTLVT |
| | VSS |
| | (SEQ ID NO: 1350) |
| 9F5-H1 | QVQLVQSGAEVKKPGASVKV |
| | SCKASGYAFSSSWMNWVRQA |
| | PGQGLEWMGRIYPGDGDTNY |
| | AQKFQGRVTMTRDTSTSTVY |
| | MELSSLRSEDTAVYYCARLL |
| | RNQPGESYAMDYWGQGTLVT |
| | VSS |
| | (SEQ ID NO: 1665) |
| 9F5-H2 | QVQLVQSGAEVKKPGASVKV |
| | SCKASGYAFSSSWMNWVRQA |
| | PGQGLEWIGRIYPGDGDTNY |
| | AQKFQGRVTMTADTSTSTVY |
| | MELSSLRSEDTAVYYCARLL |
| | RNQPGESYAMDYWGQGTLVT |
| | VSS |
| | (SEQ ID NO: 1666) |
| 9F5-H3 | QVQLVQSGAEVKKPGASLKI |
| | SCKASGYAFSSSWMNWVRQA |
| | PGQGLEWIGRIYPGDGDTNY |
| | AQKFQGRATLTADTSTSTAY |
| | MELSSLRSEDTAVYYCARLL |
| | RNQPGESYAMDYWGQGALVT |
| | VSS |
| | (SEQ ID NO: 1667) |
| Antibody 9G1 | Antibody 9G1 |
| 9G1V5-51 | EVQLVQSGAEVKKPGESLKI |
| | SCKGSGYIFTTYWIHWVRQM |
| | PGKGLEWIGRIDPNNGDTNY |
| | NPSFQGQVTISADKSISTAY |
| | LQWSSLKASDTAMYYCVMTG |
| | TDFDYWGQGTLVTVSS |
| | (SEQ ID NO: 1352) |
| 9G1V1-46 | QVQLVQSGAEVKKPGASVKV |
| | SCKASGYIFTTYWIHWVRQA |
| | PGQGLEWIGRIDPNNGDTNY |
| | NQKFQGRVTMTRDTSTSTVY |
| | MELSSLRSEDTAVYYCVMTG |
| | TDFDYWGQGTLVTVSS |
| | (SEQ ID NO: 1353) |
| 9G1V1-69 | QVQLVQSGAEVKKPGSSVKV |
| | SCKASGYIFTTYWIHWVRQA |
| | PGQGLEWIGRIDPNNGDTNY |
| | NQKFQGRVTITADESTSTAY |
| | MELSSLRSEDTAVYYCVMTG |
| | TDFDYWGQGTLVTVSS |
| | (SEQ ID NO: 1354) |
| 9G1V3-23 | EVQLLESGGGLVQPGGSLRL |
| | SCAASGYIFTTYWIHWVRQA |
| | PGKGLEWIGRIDPNNGDTNY |
| | NDSVKGRFTISRDNSKNTLY |
| | LQMNSLRAEDTAVYYCVMTG |
| | TDFDYWGOGTLVTVSS |
| | (SEQ ID NO: 1355) |
| 9G1V3-30 | QVQLVESGGGVVQPGRSLRL |
| | SCAASGYIFTTYWIHWVRQA |
| | PGKGLEWIGRIDPNNGDTNY |
| | NDSVKGRFTISRDNSKNTLY |
| | LQMNSLRAEDTAVYYCVMTG |
| | TDFDYWGQGTLVTVSS |
| | (SEQ ID NO: 1356) |
| 9G1V3-7 | EVQLVESGGGLVQPGGSLRL |
| | SCAASGYIFTTYWIHWVRQA |
| | PGKGLEWIGRIDPNNGDTNY |
| | NDSVKGRFTISRDNAKNSLY |
| | LQMNSLRAEDTAVYYCVMTG |
| | TDFDYWGQGTLVTVSS |
| | (SEQ ID NO: 1357) |
| 9G1V3-48 | EVQLVESGGGLVQPGGSLRL |
| | SCAASGYIFTTYWIHWVRQA |
| | PGKGLEWIGRIDPNNGDTNY |
| | NDSVKGRFTISRDNAKNSLY |
| | LQMNSLRAEDTAVYYCVMTG |
| | TDFDYWGQGTLVTVSS |
| | (SEQ ID NO: 1357) |
| 9G1V4-59 | QVQLQESGPGLVKPSETLSL |
| | TCTVSGYIFTTYWIHWIRQP |
| | PGKGLEWIGRIDPNNGDTNY |
| | NPSLKSRVTISVDTSKNQFS |
| | LKLSSVTAADTAVYYCVMTG |
| | TDFDYWGQGTLVTVSS |
| | (SEQ ID NO: 1358) |
| 9G1V3-I5 | EVQLVESGGGLVKPGGSLRL |
| | SCAASGYIFTTYWIHWVRQA |
| | PGKGLEWIGRIDPNNGDTNY |
| | NAPVKGRFTISRDDSKNTLY |
| | LQMNSLKTEDTAVYYCVMTG |
| | TDFDYWGQGTLVTVSS |
| | (SEQ ID NO: 1359) |
| 9G1V4-30-4 | QVQLQESGPGLVKPSQTLSL |
| | TCTVSGYIFTTYWIHWIRQP |
| | PGKGLEWIGRIDPNNGDTNY |
| | NPSLKSRVTISVDTSKNQFS |
| | LKLSSVTAADTAVYYCVMTG |
| | TDFDYWGQGTLVTVSS |
| | (SEQ ID NO: 1360) |
| Antibody 9G3 | Antibody 9G3 |
| 9G3V3-15 | EVQLVESGGGLVKPGGSLRL |
| | SCAASGFNFNTYAMKWVRQA |
| | PGKGLEWIARIRSNSNDYAT |
| | NYSAPVKGRFTISRDDSKNT |
| | LYLQMNSLKTEDTAVYYCVG |
| | HKINNYPFAHWGQGTLVTVS |
| | S |
| | (SEQ ID NO: 1456) |
| 9G3V3-23 | EVQLLESGGGLVQPGGSLRL |
| | SCAASGFNFNTYAMKWVRQA |
| | PGKGLEWIARIRSNSNDYAT |
| | NYSDSVKGRFTISRDNSKNT |
| | LYLQMNSLRAEDTAVYYCVG |
| | HKINNYPFAHWGQGTLVTVS |
| | S |
| | (SEQ ID NO: 1457) |
| 9G3V3-30 | QVQLVESGGGVVQPGRSLRL |
| | SCAASGFNFNTYAMKWVRQA |
| | PGKGLEWIARIRSNSNDYAT |
| | NYSDSVKGRFTISRDNSKNT |
| | LYLQMNSLRAEDTAVYYCVG |
| | HKINNYPFAHWGQGTLVTVS |
| | S |
| | (SEQ ID NO: 1458) |
| 9G3V3-48 | EVQLVESGGGLVQPGGSLRL |
| | SCAASGFNFNTYAMKWVRQA |
| | PGKGLEWIARIRSNSNDYAT |
| | NYSDSVKGRFTISRDNAKNS |
| | LYLQMNSLRAEDTAVYYCVG |
| | HKINNYPFAHWGOGTLVTVS |
| | S |
| | (SEQ ID NO: 1459) |
| 9G3V3-7 | EVQLVESGGGLVQPGGSLRL |
| | SCAASGFNFNTYAMKWVRQA |
| | PGKGLEWIARIRSNSNDYAT |
| | NYSDSVKGRFTISRDNAKNS |
| | LYLQMNSLRAEDTAVYYCVG |
| | HKINNYPFAHWGQGTLVTVS |
| | S |
| | (SEQ ID NO: 1460) |
| 9G3V1-69 | QVQLVQSGAEVKKPGSSVKV |
| | SCKASGFNFNTYAMKWVRQA |
| | PGQGLEWIARIRSNSNDYAT |
| | NYSQKFQGRVTITADESTST |
| | AYMELSSLRSEDTAVYYCVG |
| | HKINNYPFAHWGQGTLVTVS |
| | S |
| | (SEQ ID NO: 1461) |
| 9G3V1-46 | QVQLVQSGAEVKKPGASVKV |
| | SCKASGFNFNTYAMKWVRQA |
| | PGQGLEWIARIRSNSNDYAT |
| | NYSQKFQGRVTMTRDTSTST |
| | VYMELSSLRSEDTAVYYCVG |
| | HKINNYPFAHWGQGTLVTVS |
| | S |
| | (SEQ ID NO: 1462) |
| 9G3V5-51 | EVQLVQSGAEVKKPGESLKI |
| | SCKGSGFNFNTYAMKWVRQM |
| | PGKGLEWIARIRSNSNDYAT |
| | NYSPSFQGQVTISADKSIST |
| | AYLQWSSLKASDTAMYYCVG |
| | HKINNYPFAHWGQGTLVTVS |
| | S |
| | (SEQ ID NO: 1463) |
| 9G3V4-59 | QVQLQESGPGLVKPSETLSL |
| | TCTVSGFNFNTYAMKWIRQP |
| | PGKGLEWIARIRSNSNDYAT |
| | NYSPSLKSRVTISVDTSKNQ |
| | FSLKLSSVTAADTAVYYCVG |
| | HKINNYPFAHWGQGTLVTVS |
| | S |
| | (SEQ ID NO: 1464) |
| 9G3V4-30-4 | QVQLQESGPGLVKPSQTLSL |
| | TCTVSGFNFNTYAMKWIRQP |
| | PGKGLEWIARIRSNSNDYAT |
| | NYSPSLKSRVTISVDTSKNQ |
| | FSLKLSSVTAADTAVYYCVG |
| | HKINNYPFAHWGQGTLVTVS |
| | S |
| | (SEQ ID NO: 1465) |
| Antibody 10A9 | Antibody 10A9 |
| 10A9V5-51 | EVQLVQSGAEVKKPGESLKI |
| | SCKGSGYPFSNFWITWVRQM |
| | PGKGLEWIGDIYPGSDNRNF |
| | NPSFQGQVTISADKSISTAY |
| | LQWSSLKASDTAMYYCAREA |
| | YYTNPGFAYWGQGTLVTVSS |
| | (SEQ ID NO: 1362) |
| 10A9V1-69 | QVQLVQSGAEVKKPGSSVKV |
| | SCKASGYPFSNFWITWVRQA |
| | PGQGLEWIGDIYPGSDNRNF |
| | NQKFQGRVTITADESTSTAY |
| | MELSSLRSEDTAVYYCAREA |
| | YYTNPGFAYWGQGTLVTVSS |
| | (SEQ ID NO: 1363) |
| 10A9V1-46 | QVQLVQSGAEVKKPGASVKV |
| | SCKASGYPFSNFWITWVRQA |
| | PGQGLEWIGDIYPGSDNRNF |
| | NQKFQGRVTMTRDTSTSTVY |
| | MELSSLRSEDTAVYYCAREA |
| | YYTNPGFAYWGQGTLVTVSS |
| | (SEQ ID NO: 1364) |
| 10A9V3-58 | EVQLVESGGGLVQPGGSLRL |
| | SCAASGYPFSNFWITWVRQA |
| | PGKGLEWIGDIYPGSDNRNF |
| | NDSVKGRFTISRDNAKNSLY |
| | LQMNSLRAEDTAVYYCAREA |
| | YYTNPGFAYWGQGTLVTVSS |
| | (SEQ ID NO: 1365) |
| 10A9V3-7 | EVQLVESGGGLVQPGGSLRL |
| | SCAASGYPFSNFWITWVRQA |
| | PGKGLEWIGDIYPGSDNRNF |
| | NDSVKGRFTISRDNAKNSLY |
| | LQMNSLRAEDTAVYYCAREA |
| | YYTNPGFAYWGQGTLVTVSS |
| | (SEQ ID NO: 1365) |
| 10A9V3-30 | QVQLVESGGGVVQPGRSLRL |
| | SCAASGYPFSNFWITWVRQA |
| | PGKGLEWIGDIYPGSDNRNF |
| | NDSVKGRFTISRDNSKNTLY |
| | LQMNSLRAEDTAVYYCAREA |
| | YYTNPGFAYWGQGTLVTVSS |
| | (SEQ ID NO: 1366) |
| 10A9V3-23 | EVQLLESGGGLVQPGGSLRL |
| | SCAASGYPFSNFWTTWVRQA |
| | PGKGLEWIGDIYPGSDNRNF |
| | NDSVKGRFTISRDNSKNTLY |
| | LQMNSLRAEDTAVYYCAREA |
| | YYTNPGFAYWGQGTLVTVSS |
| | (SEQ ID NO: 1367) |
| 10A9V4-59 | QVQLQESGPGLVKPSETLSL |
| | TCTVSGYPFSNFWITWIRQP |
| | PGKGLEWIGDIYPGSDNRNF |
| | NPSLKSRVTISVDTSKNQFS |
| | LKLSSVTAADTAVYYCAREA |
| | YYTNPGFAYWGQGTLVTVSS |
| | (SEQ ID NO: 1368) |
| 10A9V3-15 | EVQLVESGGGLVKPGGSLRL |
| | SCAASGYPFSNFWITWVRQA |
| | PGKGLEWIGDIYPGSDNRNF |
| | NAPVKGRFTISRDDSKNTLY |
| | LQMNSLKTEDTAVYYCAREA |
| | YYTNPGFAYWGQGTLVTVSS |
| | (SEQ ID NO: 1369) |
| 10A9V4-39 | QLQLQESGPGLVKPSETLSL |
| | TCTVSGYPFSNFWITWIRQP |
| | PGKGLEWIGDIYPGSDNRNF |
| | NPSLKSRVTISVDTSKNQFS |
| | LKLSSVTAADTAVYYCAREA |
| | YYTNPGFAYWGQGTLVTVSS |
| | (SEQ ID NO: 1370) |
| Antibody 11A8 | Antibody 11A8 |
| 11A8V3-15 | EVQLVESGGGLVKPGGSLRL |
| | SCAASGFNFNTYAMNWVRQA |
| | PGKGLEWVARIRSKSNNYAT |
| | YYAAPVKGRFTISRDDSKNT |
| | LYLQMNSLKTEDTAVYYCVR |
| | HYSNYGWGFAYWGQGTLVTV |
| | SS |
| | (SEQ ID NO: 1372) |
| 11A8V3-48 | EVQLVESGGGLVQPGGSLRL |
| | SCAASGFNFNTYAMNWVRQA |
| | PGKGLEWVARIRSKSNNYAT |
| | YYADSVKGRFTISRDNAKNS |
| | LYLQMNSLRAEDTAVYYCVR |
| | HYSNYGWGFAYWGQGTLV |
| | TVSS |
| | (SEQ ID NO: 1373) |
| 11A8V3-23 | EVQLLESGGGLVQPGGSLRL |
| | SCAASGFNFNTYAMNWVRQA |
| | PGKGLEWVARIRSKSNNYAT |
| | YYADSVKGRFTISRDNSKNT |
| | LYLQMNSLRAEDTAVYYCVR |
| | HYSNYGWGFAYWGQGTLVTV |
| | SS |
| | (SEQ ID NO: 1374) |
| 11A8V3-30 | QVQLVESGGGVVQPGRSLRL |
| | SCAASGFNFNTYAMNWVRQA |
| | PGKGLEWVARIRSKSNNYAT |
| | YYADSVKGRFTISRDNSKNT |
| | LYLQMNSLRAEDTAVYYCVR |
| | HYSNYGWGFAYWGQGTLVTV |
| | SS |
| | (SEQ ID NO: 1375) |
| 11A8V3-7 | EVQLVESGGGLVQPGGSLRL |
| | SCAASGFNFNTYAMNWVRQA |
| | PGKGLEWVARIRSKSNNYAT |
| | YYADSVKGRFTISRDNAKNS |
| | LYLQMNSLRAEDTAVYYCVR |
| | HYSNYGWGFAYWGQGTLVTV |
| | SS |
| | (SEQ ID NO: 1373) |
| 11A8V1-69 | QVQLVQSGAEVKKPGSSVKV |
| | SCKASGFNFNTYAMNWVRQA |
| | PGQGLEWVARIRSKSNNYAT |
| | YYAQKFQGRVTITADESTST |
| | AYMELSSLRSEDTAVYYCVR |
| | HYSNYGWGFAYWGQGTLVTV |
| | SS |
| | (SEQ ID NO: 1376) |
| 11A8V1-46 | QVQLVQSGAEVKKPGASVKV |
| | SCKASGFNFNTYAMNWVRQA |
| | PGQGLEWVARIRSKSNNYAT |
| | YYAQKFQGRVTMTRDTSTST |
| | VYMELSSLRSEDTAVYYCVR |
| | HYSNYGWGFAYWGQGTLVTV |
| | SS |
| | (SEQ ID NO: 1377) |
| 11A8V5-5I | EVQLVQSGAEVKKPGESLKI |
| | SCKGSGFNFNTYAMNWVRQM |
| | PGKGLEWVARIRSKSNNYAT |
| | YYAPSFQGQVTISADKSIS |
| | TAYLQWSSLKASDTAMYYC |
| | VRHYSNYGWGFAYWGQGTL |
| | VTVSS |
| | (SEQ ID NO: 1378) |
| 11A8V4-59 | QVQLQESGPGLVKPSETLSL |
| | TCTVSGFNFNTYAMNWIRQP |
| | PGKGLEWVARIRSKSNNYAT |
| | YYAPSLKSRVTISVDTSKNQ |
| | FSLKLSSVTAADTAVYYCVR |
| | HYSNYGWGFAYWGOGTLVTV |
| | SS |
| | (SEQ ID NO: 1379) |
| 11A8V4-39 | QLQLQESGPGLVKPSETLSL |
| | TCTVSGFNFNTYAMNYVIRQ |
| | PPGKGLEWVARIRSKSNNYA |
| | TYYAPSLKSRVTISVDTSKN |
| | QFSLKLSSVTAADTAVYYCV |
| | RHYSNYGWGFAYWGQGTLVT |
| | VSS |
| | (SEQ ID NO: 1380) |
| Antibody 12D9 | Antibody 12D9 |
| 12D9V1-46 | QVQLVQSGAEVKKPGASVKV |
| | SCKASGYTFSDYYIHWVRQA |
| | PGQGLEWIGYIYPNNGDNGY |
| | NQKFQGRVTMTRDTSTSTVY |
| | MELSSLRSEDTAVYYCARRG |
| | YYGGSYDYWGQGTLVTVSS |
| | (SEQ ID NO: 1382) |
| 12D9V5-51 | EVQLVQSGAEVKKPGESLKI |
| | SCKGSGYTFSDYYIHWVRQM |
| | PGKGLEWIGYIYPNNGDNGY |
| | NPSFQGQVTISADKSISTAY |
| | LQWSSLKASDTAMYYCARRG |
| | YYGGSYDYWGQGTLVTVSS |
| | (SEQ ID NO: 1383) |
| 12D9V1-69 | QVQLVQSGAEVKKPGSSVKV |
| | SCKASGYTFSDYYIHWVRQA |
| | PGQGLEWIGYIYPNNGDNGY |
| | NQKFQGRVTITADESTSTAY |
| | MELSSLRSEDTAVYYCARRG |
| | YYGGSYDYWGQGTLVTVSS |
| | (SEQ ID NO: 1384) |
| 12D9V3-48 | EVQLVESGGGLVQPGGSLRL |
| | SCAASGYTFSDYYIHWVRQA |
| | PGKGLEWIGYIYPNNGDNGY |
| | NDSVKGRFTISRDNAKNSLY |
| | LQMNSLRAEDTAVYYCARRG |
| | YYGGSYDYWGQGTLVTVSS |
| | (SEQ ID NO: 1385) |
| 12D9V3-30 | QVQLVESGGGVVQPGRSLRL |
| | SCAASGYTFSDYYIHWVRQA |
| | PGKGLEWIGYIYPNNGDNGY |
| | NDSVKGRFTISRDNSKNTLY |
| | LQMNSLRAEDTAVYYCARRG |
| | YYGGSYDYWGQGTLVTVSS |
| | (SEQ ID NO: 1386) |
| 12D9V3-23 | EVQLLESGGGLVQPGGSLRL |
| | SCAASGYTFSDYYIHWVRQA |
| | PGKGLEWIGYIYPNNGDNGY |
| | NDSVKGRFTISRDNSKNTLY |
| | LQMNSLRAEDTAVYYCARRG |
| | YYGGSYDYWGQGTLVTVSS |
| | (SEQ ID NO: 1387) |
| 12D9V3-7 | EVQLVESGGGLVQPGGSLRL |
| | SCAASGYTFSDYYIHWVRQA |
| | PGKGLEWIGYIYPNNGDNGY |
| | NDSVKGRFTISRDNAKNSLY |
| | LQMNSLRAEDTAVYYCARRG |
| | YYGGSYDYWGQGTLVTVSS |
| | (SEQ ID NO: 1385) |
| 12D9V4-59 | QVQLQESGPGLVKPSETLSL |
| | TCTVSGYTFSDYYIHWIRQP |
| | PGKGLEWIGYIYPNNGDNGY |
| | NPSLKSRVTISVDTSKNQFS |
| | LKLSSVTAADTAVYYCARRG |
| | YYGGSYDYWGQGTLVTVSS |
| | (SEQ ID NO: 1388) |
| 12D9V3-15 | EVQLVESGGGLVKPGGSLRL |
| | SCAASGYTFSDYYIHWVRQA |
| | PGKGLEWIGYIYPNNGDNGY |
| | NAPVKGRFTISRDDSKNTLY |
| | LQMNSLKTEDTAVYYCARRG |
| | YYGGSYDYWGQGTLVTVSS |
| | (SEQ ID NO: 1389) |
| 12D9V4-30-4 | QVQLQESGPGLVKPSQTLSL |
| | TCTVSGYTFSDYYIHWIRQP |
| | PGKGLEWIGYIYPNNGD |
| | NGYNPSLKSRVTISVDTSKN |
| | QFSLKLSSVTAADTAVYYCA |
| | RRGYYGGSYDYWGQGTLVTV |
| | SS |
| | (SEQ ID NO: 1390) |
| Antibody 12F9 | Antibody 12F9 |
| 12F9V3-15 | EVQLVESGGGLVKPGGSLRL |
| | SCAASGFRFNTYAMTWVRQA |
| | PGKGLEWEGVIRRKSSNFAT |
| | LYAAPVKGRFTISRDDSKNT |
| | LYLQMNSLKTEDTAVYYCVR |
| | HKSNKYPFVYWGQGTLVTVS |
| | S |
| | (SEQ ID NO: 1392) |
| 12F9V3-23 | EVQLLESGGGLVQPGGSLRL |
| | SCAASGFRFNTYAMTWVRQA |
| | PGKGLEWEGVIRRKSSNFAT |
| | LYADSVKGRFTISRDNSKNT |
| | LYLQMNSLRAEDTAVYYCVR |
| | HKSNKYPFVYWGQGTLVTVS |
| | S |
| | (SEQ ID NO: 1393) |
| 12F9V3-48 | EVQLVESGGGLVQPGGSLRL |
| | SCAASGFRFNTYAMTWVRQA |
| | PGKGLEWEGVIRRKSSNFAT |
| | LYADSVKGRFTISRDNAKNS |
| | LYLQMNSLRAEDTAVYYCVR |
| | HKSNKYPFVYWGQGTLVTVS |
| | S |
| | (SEQ ID NO: 1394) |
| 12F9V3-30 | QVQLVESGGGVVQPGRSLRL |
| | SCAASGFRFNTYAMTWVRQA |
| | PGKGLEWEGVIRRKSSNFAT |
| | LYADSVKGRFTISRDNSKNT |
| | LYLQMNSLRAEDTAVYYCVR |
| | HKSNKYPFVYWGQGTLVTVS |
| | S |
| | (SEQ ID NO: 1395) |
| 12F9V3-7 | EVQLVESGGGLVQPGGSLRL |
| | SCAASGFRFNTYAMTWVRQA |
| | PGKGLEWEGVIRRKSSNFAT |
| | LYADSVKGRFTISRDNAKNS |
| | LYLQMNSLRAEDTAVYYCVR |
| | HKSNKYPFVYWGQGTLVTVS |
| | S |
| | (SEQ ID NO: 1394) |
| 12F9V1-69 | QVQLVQSGAEVKKPGSSVKV |
| | SCKASGFRFNTYAMTWVRQA |
| | PGQGLEWEGVIRRKSSNFAT |
| | LYAQKFQGRVTITADESTST |
| | AYMELSSLRSEDTAVYYCVR |
| | HKSNKYPFVYWGQGTLVTVS |
| | S |
| | (SEQ ID NO: 1396) |
| 12F9V1-46 | QVQLVQSGAEVKKPGASVKV |
| | SCKASGFRFNTYAMTWVRQA |
| | PGQGLEWEGVLRRKSSNFAT |
| | LYAQKFQGRVTMTRDTSTST |
| | VYMELSSLRSEDTAVYYCVR |
| | HKSNKYPFVYWGQGTLVTVS |
| | S |
| | (SEQ ID NO: 1397) |
| 12F9V5-51 | EVQLVQSGAEVKKPGESLKI |
| | SCKGSGFRFNTYAMTWVRQM |
| | PGKGLEWEGVIRRKSSNFAT |
| | LYAPSFQGQVTISADKSIST |
| | AYLQWSSLKASDTAMYYCVR |
| | HKSNKYPFVYWGQGTLVTVS |
| | S |
| | (SEQ ID NO: 1398) |
| 12F9V4-59 | QVQLQESGPGLVKPSETLSL |
| | TCTVSGFRFNTYAMTWIRQP |
| | PGKGLEWEGVIRRKSSNFAT |
| | LYAPSLKSRVTISVDTSKNQ |
| | FSLKLSSVTAADTAVYYCVR |
| | HKSNKYPFVYWGQGTLVTVS |
| | S |
| | (SEQ ID NO: 1399) |
| 12F9V4-39 | QLQLQESGPGLVKPSETLSL |
| | TCTVSGFRFNTYAMTWIRQP |
| | PGKGLEWEGVTRRKSSNFAT |
| | LYAPSLKSRVTISVDTSKNQ |
| | FSLKLSSVTAADTAVYYCVR |
| | HKSNKYPFVYWGQGTLVTVS |
| | S |
| | (SEQ ID NO: 1400) |
| Antibody 10C1 | Antibody 10C1 |
| 10C1V3-15 | EVQLVESGGGLVKPGGSLRL |
| | SCAASGFTFSDAWMDWVRQA |
| | PGKGLEWVAEIRNKINNHAT |
| | YYAAPVKGRFTISRDDSKNT |
| | LYLQMNSLKTEDTAVYYCTS |
| | LYDGSYLRFAYWGQGTLVTV |
| | SS |
| | (SEQ ID NO: 1467) |
| 10C1V3-7 | EVQLVESGGGLVQPGGSLRL |
| | SCAASGFTFSDAWMDWVRQA |
| | PGKGLEWVAEIRNKINNHAT |
| | YYADSVKGRFTISRDNAKNS |
| | LYLQMNSLRAEDTAVYYCTS |
| | LYDGSYLRFAYWGQGTLVTV |
| | SS |
| | (SEQ ID NO: 1468) |
| 10C1V3-23 | EVQLLESGGGLVQPGGSLRL |
| | SCAASGFTFSDAWMDWVRQA |
| | PGKGLEWVAEIRNKINNHAT |
| | YYADSVKGRFTISRDNSKNT |
| | LYLQMNSLRAEDTAVYYCTS |
| | LYDGSYLRFAYWGQGTLVTV |
| | SS |
| | (SEQ ID NO: 1469) |
| 10C1V3-30 | QVQLVESGGGVVQPGRSLRL |
| | SCAASGFTFSDAWMDWVRQA |
| | PGKGLEWVAEIRNKINNHAT |
| | YYADSVKGRFTISRDNSKNT |
| | LYLQMNSLRAEDTAVYYCTS |
| | LYDGSYLRFAYWGQGTLVTV |
| | SS |
| | (SEQ ID NO: 1470) |
| 10C1V3-48 | EVQLVESGGGLVQPGGSLRL |
| | SCAASGFTFSDAWMDWVRQA |
| | PGKGLEWVAEIRNKINNHAT |
| | YYADSVKGRFTISRDNAKNS |
| | LYLQMNSLRAEDTAVYYCTS |
| | LYDGSYLRFAYWGQGTLVTV |
| | SS |
| | (SEQ ID NO: 1471) |
| 10C1V1-69 | QVQLVQSGAEVKKPGSSVKV |
| | SCKASGFTFSDAWMDWVRQA |
| | PGQGLEWVAEIRNKINNHAT |
| | YYAQKFQGRVTITADESTST |
| | AYMELSSLRSEDTAVYYCTS |
| | LYDGSYLRFAYWGQGTLVTV |
| | SS |
| | (SEQ ID NO: 1472) |
| 10C1V1-46 | QVQLVQSGAEVKKPGASVKV |
| | SCKASGFTFSDAWMDWVRQA |
| | PGQGLEWVAEIRNKINNHAT |
| | YYAQKFQGRVTMTRDTSTST |
| | VYMELSSLRSEDTAVYYCTS |
| | LYDGSYLRFAYWGQGTLVTV |
| | SS |
| | (SEQ ID NO: 1473) |
| 10C1V5-51 | EVQLVQSGAEVKKPGESLKI |
| | SCKGSGFTFSDAWMDWVRQM |
| | PGKGLEWVAEIRNKINNHAT |
| | YYAPSFQGQVTISADKSIST |
| | AYLQWSSLKASDTAMYYCTS |
| | LYDGSYLRFAYWGQGTLVTV |
| | SS |
| | (SEQ ID NO: 1474) |
| 10C1V4-59 | QVQLQESGPGLVKPSETLSL |
| | TCTVSGFTFSDAWMDWIRQP |
| | PGKGLEWVAEIRNKINNHAT |
| | YYAPSLKSRVTISVDTSKNQ |
| | FSLKLSSVTAADTAVYYCTS |
| | LYDGSYLRFAYWGQGTLVTV |
| | SS |
| | (SEQ ID NO: 1475) |
| 10C1V4-30-4 | QVQLQESGPGLVKPSQTLSL |
| | TCTVSGFTFSDAWMDWIRQP |
| | PGKGLEWVAEIRNKINNHAT |
| | YYAPSLKSRVTISVDTSKNQ |
| | FSLKLSSVTAADTAVYYCTS |
| | LYDGSYLRFAYWGQGTLVTV |
| | SS |
| | (SEQ ID NO: 1476) |
| Antibody 7E9 | Antibody 7E9 |
| 7E9V1-46 | QVQLVQSGAEVKKPGASVKV |
| | SCKASGYTFTEYTMHWVRQA |
| | PGQGLEWIGGINPNNGGTSY |
| | KQKFQGRVTMTRDTSTSTVY |
| | MELSSLRSEDTAVYYCARGG |
| | SHYYAMDYWGQGTLVTVSS |
| | (SEQ ID NO: 1478) |
| 7E9V1-69 | QVQLVQSGAEVKKPGSSVKV |
| | SCKASGYTFTEYTMHWVRQA |
| | PGQGLEWIGGINPNNGGTSY |
| | KQKFQGRVTITADESTSTAY |
| | MELSSLRSEDTAVYYCARGG |
| | SHYYAMDYWGQGTLVTVSS |
| | (SEQ ID NO: 1479) |
| 7E9V5-51 | EVQLVQSGAEVKKPGESLKI |
| | SCKGSGYTFTEYTMHWVRQM |
| | PGKGLEWIGGINPNNGGTSY |
| | KPSFQGQVTISADKSISTAY |
| | LQWSSLKASDTAMYYCARGG |
| | SHYYAMDYWGQGTLVTVSS |
| | (SEQ ID NO: 1480) |
| 7E9V3-23 | EVQLLESGGGLVQPGGSLRL |
| | SCAASGYTFTEYTMHWVRQA |
| | PGKGLEWIGGINPNNGGTSY |
| | KDSVKGRFTISRDNSKNTLY |
| | LQMNSLRAEDTAVYYCARGG |
| | SHYYAMDYWGQGTLVTVSS |
| | (SEQ ID NO: 1481) |
| 7E9V3-30 | QVQLVESGGGVVQPGRSLRL |
| | SCAASGYTFTEYTMHWVRQA |
| | PGKGLEWIGGINPNNGGTSY |
| | KDSVKGRFTISRDNSKNTLY |
| | LQMNSLRAEDTAVYYCARGG |
| | SHYYAMDYWGQGTLVTVSS |
| | (SEQ ID NO: 1482) |
| 7E9V3-48 | EVQLVESGGGLVQPGGSLRL |
| | SCAASGYTFTEYTMHWVRQA |
| | PGKGLEWIGGINPNNGG |
| | TSYKDSVKGRFTIS |
| | RDNAKNSLYLQMNSLRAEDT |
| | AVYYCARGGSHYYAMDYWGQ |
| | GTLVTVSS |
| | (SEQ ID NO: 1483) |
| 7E9V3-7 | EVQLVESGGGLVQPGGSLRL |
| | SCAASGYTFTEYTMHWVRQA |
| | PGKGLEWIGGINPNNGGTSY |
| | KDSVKGRFTISRDNAKNSLY |
| | LQMNSLRAEDTAVYYCARGG |
| | SHYYAMDYWGQGTLVTVSS |
| | (SEQ ID NO: 1484) |
| 7E9V4-59 | QVQLQESGPGLVKPSETLSL |
| | TCTVSGYTFTEYTMHWIRQP |
| | PGKGLEWIGGINPNNGGTSY |
| | KPSLKSRVTISVDTSKNQFS |
| | LKLSSVTAADTAVYYCARGG |
| | SHYYAMDYWGQGTLVTVSS |
| | (SEQ ID NO: 1485) |
| 7E9V3-15 | EVQLVESGGGLVKPGGSLRL |
| | SCAASGYTFTEYTMHWVRQA |
| | PGKGLEWIGGINPNNGGTSY |
| | KAPVKGRFTISRDDSKNTLY |
| | LQMNSLKTEDTAVYYCARGG |
| | SHYYAMDYWGQGTLVTVSS |
| | (SEQ ID NO: 1486) |
| 7E9V4-39 | QLQLQESGPGLVKPSETLSL |
| | TCTVSGYTFTEYTMHWIRQP |
| | PGKGLEWIGGINPNNGGTSY |
| | KPSLKSRVTISVDTSKNQFS |
| | LKLSSVTAADTAVYYCARGG |
| | SHYYAMDYWGQGTLVTVSS |
| | (SEQ ID NO: 1487) |
| Antibody 8C3 | Antibody 8C3 |
| 8C3V1-46 | QVQLVQSGAEVKKPGASVKV |
| | SCKASGYSFTGYYMHWVRQA |
| | PGQGLEWIGRVNPNNGGTSY |
| | NQKFQGRVTMTRDTSTSTVY |
| | MELSSLRSEDTAVYYCVLTG |
| | GYFDYWGQGTLVTVSS |
| | (SEQ ID NO: 1489) |
| 8C3V5-51 | EVQLVQSGAEVKKPGESLKI |
| | SCKGSGYSFTGYYMHWVRQM |
| | PGKGLEWIGRVNPNNGGTSY |
| | NPSFQGQVTISADKSISTAY |
| | LQWSSLKASDTAMYYCVLTG |
| | GYFDYWGQGTLVTVSS |
| | (SEQ ID NO: 1490) |
| 8C3V3-23 | EVQLLESGGGLVQPGGSLRL |
| | SCAASGYSFTGYYMHWVRQA |
| | PGKGLEWIGRVNPNNGGTSY |
| | NDSVKGRFTISRDNSKNTLY |
| | LQMNSLRAEDTAVYYCVLTG |
| | GYFDYWGQGTLVTVSS |
| | (SEQ ID NO: 1491) |
| 8C3V1-69 | QVQLVQSGAEVKKPGSSVKV |
| | SCKASGYSFTGYYMHWVRQA |
| | PGQGLEWIGRVNPNNGGTSY |
| | NQKFQGRVTITADESTSTAY |
| | MELSSLRSEDTAVYYCVLTG |
| | GYFDYWGQGTLVTVSS |
| | (SEQ ID NO: 1492) |
| 8C3V3-30 | QVQLVESGGGVVQPGRSLRL |
| | SCAASGYSFTGYYMHWVRQA |
| | PGKGLEWIGRVNPNNGGTSY |
| | NDSVKGRFTISRDNSKNTLY |
| | LQMNSLRAEDTAVYYCVLTG |
| | GYFDYWGQGTLVTVSS |
| | (SEQ ID NO: 1493) |
| 8C3V3-48 | EVQLVESGGGLVQPGGSLRL |
| | SCAASGYSFTGYYMHWVRQA |
| | PGKGLEWIGRVNPNNGGTSY |
| | NDSVKGRFTISRDNAKNSLY |
| | LQMNSLRAEDTAVYYCVLTG |
| | GYFDYWGQGTLVTVSS |
| | (SEQ ID NO: 1494) |
| 8C3V3-7 | EVQLVESGGGLVQPGGSLRL |
| | SCAASGYSFTGYYMHWVRQA |
| | PGKGLEWIGRVNPNNGGTSY |
| | NDSVKGRFTISRDNAKNSLY |
| | LQMNSLRAEDTAVYYCVLTG |
| | GYFDYWGQGTLVTVSS |
| | (SEQ ID NO: 1495) |
| 8C3V4-59 | QVQLQESGPGLVKPSETLSL |
| | TCTVSGYSFTGYYMHWIRQP |
| | PGKGLEWIGRVNPNNGGTSY |
| | NPSLKSRVTISVDTSKNQFS |
| | LKLSSVTAADTAVYYCVLTG |
| | GYFDYWGQGTLVTVSS |
| | (SEQ ID NO: 1496) |
| 8C3V3-I5 | EVQLVESGGGLVKPGGSLRL |
| | SCAASGYSFTGYYMHWVRQA |
| | PGKGLEWIGRVNPNNGGTSY |
| | NAPVKGRFTISRDDSKNTLY |
| | LQMNSLKTEDTAVYYCVLTG |
| | GYFDYWGQGTLVTVSS |
| | (SEQ ID NO: 1497) |
| 8C3V4-39 | QLQLQESGPGLVKPSETLSL |
| | TCTVSGYSFTGYYMHWIRQP |
| | PGKGLEWIGRVNPNNGGTSY |
| | NPSLKSRVTISVDTSKNQFS |
| | LKLSSVTAADTAVYYCVLTG |
| | GYFDYWGQGTLVTVSS |
| | (SEQ ID NO: 1498) |

[0342] In some embodiments, anti-TREM2 antibodies of the present disclosure comprise a light chain variable region of any one of the antibodies listed in Tables 7A-7H, or selected from 1A7, 3A2, 3B 10, 6G12, 6H6, 7A9, 7B3, 8A1, 8E10, 8F11, 8F8, 9F5, 9F5v2, 9G1, 9G3, 10A9, 10C1, 11A8, 12E2, 12F9, 12G6, 2C7, 2F5, 3C1, 4D7, 4D11, 6C11, 6G12, 7A3, 7C5, 7E9, 7F6, 7G1, 7H1, 8C3, 8F10, 12A1, 1E9, 2C5, 3C5, 4C12, 4F2, 5A2, 6B3, 7D1, 7D9, 11D8, 8A12, 10E7, 10B 11, 10D2, 7D5, 2A7, 3G12, 6H9, 8G9, 9B4, 10A1, 11A8, 12F3, 2F8, 10E3, 1H7, 2F6, 2H8, 3A7, 7E5, 7E5v2, 7F8, 11H5, 7C5, 4F11, 12D9, 1B4v1, 1B4V2, 6H2, 7B 1 1v1, 7B 1 1v2, 18D8, 18E4v1, 18E4v2, 29F6v1, 29F6v2, 40D5v1, 40D5v2, 43B9, 44A8v1, 44A8v2, 44B4v1, and 44B4v2; and/or a heavy chain variable region of any one of the antibodies listed in Tables 7A-7H, or selected from 1A7, 3A2, 3B 10, 6G12, 6H6, 7A9, 7B3, 8A1, 8E10, 8F11, 8F8, 9F5, 9G1, 9G3, 10A9, 10C1, 11A8, 12E2, 12F9, 12G6, 2C7, 2F5, 3C1, 4D7, 4D11, 6C11, 6G12, 7A3, 7C5, 7E9, 7F6, 7G1, 7H1, 8C3, 8F10, 12A1, 1E9, 2C5, 3C5, 4C12, 4F2, 5A2, 6B3, 7D1, 7D9, 11D8, 8A12, 10E7, 10B 11, 10D2, 7D5, 2A7, 3G12, 6H9, 8G9, 9B4, 10A1, 11A8, 12F3, 2F8, 10E3, 1H7, 2F6, 2H8, 3A7, 7E5, 7F8, 11H5, 7C5, 4F11, 12D9, 1B4v1, 1B4V2, 6H2, 7B 1 1v1, 7B 1 1v2, 18D8, 18E4v1, 18E4v2, 29F6v1, 29F6v2, 40D5v1, 40D5v2, 43B9, 44A8v1, 44A8v2, 44B4v1, and 44B4v2.

[0343] In some embodiments, the anti-TREM2 antibody is an anti-TREM2 monoclonal antibody selected from 1A7, 3A2, 3B 10, 6G12, 6H6, 7A9, 7B3, 8A1, 8E10, 8F11, 8F8, 9F5, 9G1, 9G3, 10A9, 10C1, 11A8, 12E2, 12F9, 12G6, 2C7, 2F5, 3C1, 4D7, 4D11, 6C11, 6G12, 7A3, 7C5, 7E9, 7F6, 7G1, 7H1, 8C3, 8F10, 12A1, 1E9, 2C5, 3C5, 4C12, 4F2, 5A2, 6B3, 7D1, 7D9, 11D8, 8A12, 10E7, 10B 11, 10D2, 7D5, 2A7, 3G12, 6H9, 8G9, 9B4, 10A1, 11A8, 12F3, 2F8, 10E3, 1H7, 2F6, 2H8, 3A7, 7E5, 7F8, 11H5, 7C5, 4F11, 12D9, 1B4v1, 1B4V2, 6H2, 7B 1 1v1, 7B 1 1v2, 18D8, 18E4v1, 18E4v2, 29F6v1, 29F6v2, 40D5v1, 40D5v2, 43B9, 44A8v1, 44A8v2, 44B4v1, and 44B4v2, and humanized variants thereof.

[0344] In some embodiments, each of the light chain variable regions disclosed in listed in Tables 7A-7H, or selected from 1A7, 3A2, 3B 10, 6G12, 6H6, 7A9, 7B3, 8A1, 8E10, 8F11, 8F8, 9F5, 9F5v2, 9G1, 9G3, 10A9, 10C1, 11A8, 12E2, 12F9, 12G6, 2C7, 2F5, 3C1, 4D7, 4D11, 6C11, 6G12, 7A3, 7C5, 7E9, 7F6, 7G1, 7H1, 8C3, 8F10, 12A1, 1E9, 2C5, 3C5, 4C12, 4F2, 5A2, 6B3, 7D1, 7D9, 11D8, 8A12, 10E7, 10B 11, 10D2, 7D5, 2A7, 3G12, 6H9, 8G9, 9B4, 10A1, 11A8, 12F3, 2F8, 10E3, 1H7, 2F6, 2H8, 3A7, 7E5, 7E5v2, 7F8, 11H5, 7C5, 4F11, 12D9, 1B4v1 1B4V2, 6H2, 7B 1 1v1, 7B 1 1v2, 18D8, 18E4v1, 18E4v2, 29F6v1, 29F6v2, 40D5v1, 40D5v2, 43B9, 44A8v1, 44A8v2, 44B4v1, and 44B4v2; and/or each of the heavy chain variable region of any one of the antibodies listed in Tables 7A-7H, or selected from 1A7, 3A2, 3B 10, 6G12, 6H6, 7A9, 7B3, 8A1, 8E10, 8F11, 8F8, 9F5, 9G1, 9G3, 10A9, 10C1, 11A8, 12E2, 12F9, 12G6, 2C7, 2F5, 3C1, 4D7, 4D11, 6C11, 6G12, 7A3, 7C5, 7E9, 7F6, 7G1, 7H1, 8C3, 8F10, 12A1, 1E9, 2C5, 3C5, 4C12, 4F2, 5A2, 6B3, 7D1, 7D9, 11D8, 8A12, 10E7, 10B 11, 10D2, 7D5, 2A7, 3G12, 6H9, 8G9, 9B4, 10A1, 11A8, 12F3, 2F8, 10E3, 1H7, 2F6, 2H8, 3A7, 7E5, 7F8, 11H5, 7C5, 4F11, 12D9, 1B4v1, 1B4V2, 6H2, 7B 1 1v1, 7B 1 1v2, 18D8, 18E4v1, 18E4v2, 29F6v1, 29F6v2, 40D5v1, 40D5v2, 43B9, 44A8v1, 44A8v2, 44B4v1, and 44B4v2 may be attached to the light chain constant regions (Table 4) and heavy chain constant regions (Table 5) to form complete antibody light and heavy chains, respectively, as further discussed below. Further, each of the generated heavy and light chain sequences may be combined to form a complete antibody structure. It should be understood that the heavy chain and light chain variable regions provided herein can also be attached to other constant domains having different sequences than the exemplary sequences listed herein.

E. PCT Patent Application Publication No. WO2019/028292A1

[0345] In some embodiments, the TREM2 agonist is an antibody, or antigen binding fragment thereof, as described in PCT Patent Application Publication No. WO2019/028292A1 (“the '292 application”), which is incorporated by reference herein, in its entirety.

[0346] In some embodiments, the TREM2 binding agent comprises an antibody that comprises a light chain variable domain comprising a CDRL1, CDRL2, and CDRL3 (also referred to as HVR-L1, HVR-L2, and HVR-L3, respectively), and a heavy chain variable domain comprising a CDRH1, CDRH2, and CDRH3 (also referred to as HVR-H1, HVR-H2, and HVR-H3, respectively) disclosed in the '573 application specification. In some embodiments, the TREM2 binding agent comprises an antibody that comprises a light chain variable domain and a heavy chain variable domain disclosed in the '573 application specification.

[0347] In some embodiments, anti-TREM2 antibodies of the present disclosure bind both human and cynomolgus monkey TREM2 with an affinity that is at least about 1-fold higher than an anti-TREM2 antibody selected from anti-TREM2 antibody comprising a heavy chain variable region comprising the amino acid sequence of SEQ ID NO: 1734 and a light chain variable region comprising the amino acid sequence of SEQ ID NO: 1763 (e.g., antibody AL2p-h50); an anti-TREM2 antibody comprising a heavy chain variable region comprising the amino acid sequence of SEQ ID NO: 1798 and a light chain variable region comprising the amino acid sequence of SEQ ID NO: 1810 (e.g., antibody AL2p-h77); and an anti-TREM2 antibody comprising a heavy chain variable region comprising the amino acid sequence of SEQ ID NO: 1826 and a light chain variable region comprising the amino acid sequence of SEQ ID NO: 1827 (e.g., antibody AL2). In some embodiments, anti-TREM2 antibodies of the present disclosure bind to primary human immune cells with an affinity that is at least about 10 times higher than that of an anti-TREM2 antibody selected from an anti-TREM2 antibody comprising a heavy chain variable region comprising the amino acid sequence of SEQ ID NO: 1734 and a light chain variable region comprising the amino acid sequence of SEQ ID NO: 1763; an anti-TREM2 antibody comprising a heavy chain variable region comprising the amino acid sequence of SEQ ID NO: 1798 and a light chain variable region comprising the amino acid sequence of SEQ ID NO: 1810; and an anti-TREM2 antibody comprising a heavy chain variable region comprising the amino acid sequence of SEQ ID NO: 1826 and a light chain variable region comprising the amino acid sequence of SEQ ID NO: 1827. In some embodiments, anti-TREM2 antibodies of the present disclosure cluster and activate TREM2 signaling in an amount that is at least about 1-fold greater than that of an anti-TREM2 antibody selected from an anti-TREM2 antibody comprising a heavy chain variable region comprising the amino acid sequence of SEQ ID NO: 1734 and a light chain variable region comprising the amino acid sequence of SEQ ID NO: 1763; an anti-TREM2 antibody comprising a heavy chain variable region comprising the amino acid sequence of SEQ ID NO: 1798 and a light chain variable region comprising the amino acid sequence of SEQ ID NO: 1810; and an anti-TREM2 antibody comprising a heavy chain variable region comprising the amino acid sequence of SEQ ID NO: 1826 and a light chain variable region comprising the amino acid sequence of SEQ ID NO: 1827. In some embodiments, anti-TREM2 antibodies of the present disclosure increase immune cell survival in vitro that to an extent that is greater than an anti-TREM2 antibody selected from an anti-TREM2 antibody comprising a heavy chain variable region comprising the amino acid sequence of SEQ ID NO: 1734 and a light chain variable region comprising the amino acid sequence of SEQ ID NO: 1763; an anti-TREM2 antibody comprising a heavy chain variable region comprising the amino acid sequence of SEQ ID NO: 1798 and a light chain variable region comprising the amino acid sequence of SEQ ID NO: 1810; and an anti-TREM2 antibody comprising a heavy chain variable region comprising the amino acid sequence of SEQ ID NO: 1826 and a light chain variable region comprising the amino acid sequence of SEQ ID NO: 1827. In some embodiments, anti-TREM2 antibodies of the present disclosure may also have improved in vivo half-lives. In some embodiments, anti-TREM2 antibodies of the present disclosure may also decreases plasma levels of soluble TREM2 in vivo. In some embodiments, anti-TREM2 antibodies of the present disclosure may also decrease soluble TREM2. In some embodiments, the soluble TREM2 is decreased about any of 10, 20, 30, 40, 50 or 60%.

[0348] In some embodiments, the antibody binds to a TREM2 protein, wherein the antibody comprises a heavy chain variable region and a light chain variable region, wherein the heavy chain variable region comprises: an HVR-H1 comprising the sequence according to Formula I: YAFX₁X₂X₃WMN, wherein X₁ is S or W, X₂ is S, L, or R. and X₃ is S, D, H, Q, or E (SEQ ID NO: 1828); an HVR-H2 comprising the sequence according to Formula II: RIYPGX₁GX₂TNYAX₃KX₄X₅G, wherein X₁ is D, G, E, Q, or V, X₂ is D or Q, X₃ is Q, R, H, W, Y, or G, X₄ is F, R, or W, and X₅ is Q, R, K, or H (SEQ ID NO: 1829); and an HVR-H3 comprising the sequence according to Formula III: ARLLRNX₁PGX₂SYAX₃DY, wherein X, is Q or K, X₂ is E, S, or A, and X₃ is M or H (SEQ ID NO: 1830), and wherein the antibody is not an antibody comprising a heavy chain variable region comprising an HVR-H1 comprising the sequence of YAFSSSWMN (SEQ ID NO: 1831), an HVR-H2 comprising the sequence of RIYPGDGDTNYAQKFQG (SEQ ID NO: 1832), and an HVR-H3 comprising the sequence of ARLLRNQPGESYAMDY (SEQ ID NO: 1833). In some embodiments, the TREM2 agonist is an antibody that binds to a TREM2 protein, wherein the antibody comprises a heavy chain variable region and a light chain variable region, wherein the light chain variable region comprises: an HVR-L1 comprising the sequence according to Formula IV: RX₁SX₂SLX₃HSNX₄YTYLH, wherein X₁ is S or T, X₂ is Q, R, or S, X₃ is V or I, and. X₄ is G, R, W, Q, or A (SEQ ID NO: 1834); an HVR-L2 comprising the sequence according to Formula V: KVSNRX₁S, wherein X) is F, R, V, or K (SEQ ID NO: 1835); and an HVR-L3 comprising the sequence according to Formula V: SQSTRVPYT (SEQ ID NO: 1836), and wherein the antibody is not an antibody comprising a light chain variable region comprising an HVR-L1 comprising the sequence of RSSQSLVHSNGYTYLH (SEQ ID NO: 1837), an HVR-L2 comprising the sequence of KVSNRFS (SEQ ID NO: 1838), and an HVR-L3 comprising the sequence of SQSTRVPYT (SEQ ID NO: 1836). In some embodiments, the antibody comprises a heavy chain variable region and a light chain variable region, wherein the heavy chain variable region comprises: an HVR-H1 comprising the sequence according to Formula I: YAFX₁X₂X₃WMN, wherein X₁ is S or W, X₂ is S, L, or R, and X₃ is S, D, H, Q, or E (SEQ ID NO: 1828); an HVR-H2 comprising the sequence according to Formula II: RIYPGX₁GX₂TNYAX₃KX₄X₅G, wherein X₁ is D, G, E, Q, or V, X₂ is D or Q, X₃ is Q, R, H, W, Y, or G, X₄ is F, R, or W, and X₅ is Q, R, K, or H (SEQ ID NO: 1829); and an HVR-H3 comprising the sequence according to Formula III: ARLLRNX₁PGX₂SYAX₃DY, wherein X₁ is Q or K, X₂ is E, S, or A, and X₃ is M or H (SEQ ID NO: 1830), and the light chain variable region comprises: an HVR-L1 comprising the sequence according to Formula IV: RX₁5X₂SLX₃HSNX₄YTYLH, wherein X, is S or T, X₂ is Q, R, or S, X₃ is V or I, and X₄ is G, R, W, Q, or A (SEQ ID NO: 1834); an HVR-L2 comprising the sequence according to Formula V: KVSNRX₁S, wherein X₁ is F, R, V, or K (SEQ ID NO: 1835); and an HVR-L3 comprising the sequence: SQSTRVPYT (SEQ ID NO: 1836), and wherein the antibody is not an antibody comprising a heavy chain variable region comprising an HVR-H1 comprising the sequence of YAFSSSWMN (SEQ ID NO: 1831), an HVR-H2 comprising the sequence of RIYPGDGDTNYAQKFQG (SEQ ID NO: 1832), and an HVR-H3 comprising the sequence of ARLLRNQPGESYAMDY (SEQ ID NO: 1833), and comprising a light chain variable region comprising an HVR-L1 comprising the sequence of RSSQSLVHSNGYTYLH (SEQ ID NO: 1837), an HVR-L2 comprising the sequence of KVSNRFS (SEQ ID NO: 1838), and an HVR-L3 comprising the sequence of SQSTRVPYT (SEQ ID NO: 1836).

[0349] In some embodiments, the antibody binds to a TREM2 protein, wherein the antibody comprises a heavy chain variable region and a light chain variable region, wherein the heavy chain variable region comprises: an HVR-H1 comprising a sequence selected from the group consisting of SEQ ID Nos: 1839 and 1843; an HVR-H2 comprising a sequence selected from the group consisting of SEQ ID Nos: 1840, 1842, 1844, and 1848; and an HVR-H3 comprising a sequence selected from the group consisting of SEQ ID Nos: 1833 and 1845; and/or the light the light chain variable region comprises: an HVR-L1 comprising a sequence selected from the group consisting of 1837, 1846, 1849, and 1851; an HVR-L2 comprising a sequence selected from the group consisting of SEQ ID Nos: 1838, 1841, and 1847; and an HVR-L3 comprising the sequence of SEQ ID NO: 1836. In some embodiments, the antibody comprises a heavy chain variable region and a light chain variable region, wherein the heavy chain variable region comprises: an HVR-H1 comprising the sequence of SEQ ID No: 1839; an HVR-H2 comprising a sequence selected from the group consisting of SEQ ID Nos: 1840, 1842, and 1848; and an HVR-H3 comprising the sequence of SEQ ID No: 1833; and/or the light the light chain variable region comprises: an HVR-L1 comprising a sequence selected from the group consisting of 1837, 1849, and 1851; an HVR-L2 comprising a sequence selected from the group consisting of SEQ ID Nos: 1838 and 1841; and an HVR-L3 comprising the sequence of SEQ ID NO: 1836.

[0350] In some embodiments, the antibody binds to a TREM2 protein, wherein the antibody comprises a heavy chain variable region and a light chain variable region, wherein the heavy chain variable region comprises the HVR-H1, HVR-H2, and HVR-H3 of antibody AL2p-2, AL2p-3, AL2p-4, AL2p-7, AL2p-8, AL2p-9, AL2p-10, AL2p-11, AL2p-12, AL2p-13, AL2p-14, AL2p-15, AL2p-16, AL2p-17, AL2p-18, AL2p-19, AL2p-20, AL2p-21, AL2p-22, AL2p-23, AL2p-24, AL2p-25, AL2p-26, AL2p-27, AL2p-28, AL2p-29, AL2p-30, AL2p-31, AL2p-32, AL2p-35, AL2p-36, AL2p-37, AL2p-38, AL2p-39, AL2p-40, AL2p-41, AL2p-42, AL2p-43, AL2p-44, AL2p-45, AL2p-46, AL2p-47, AL2p-48, AL2p-49, AL2p-50, AL2p-51, AL2p-52, AL2p-53, AL2p-54, AL2p-55, AL2p-56. AL2p-57, AL2p-58. AL2p-59, AL2p-60. AL2p-61, or AL2p-62 (as shown in Tables 8A to 8C). In some embodiments, the antibody comprises a heavy chain variable region and a light chain variable region, wherein the light chain variable region comprises the HVR-L1, HVR-L2, and HVR-L3 of antibody AL2p-5, AL2p-6, AL2p-7, AL2p-8, AL2p-9, AL2p-10, AL2p-11, AL2p-12, AL2p-13, AL2p-14, AL2p-15, AL2p-16, AL2p-17, AL2p-18, AL2p-19, AL2p-20, AL2p-21, AL2p-22, AL2p-23, AL2p-24, AL2p-25, AL2p-26, AL2p-27, AL2p-28, AL2p-29, AL2p-30, AL2p-31, AL2p-32, AL2p-33, AL2p-38, AL2p-39, AL2p-40, AL2p-41, AL2p-42, AL2p-43, AL2p-44, AL2p-45, AL2p-46, AL2p-47, AL2p-48, AL2p-49, AL2p-50, AL2p-51, AL2p-52, AL2p-53, AL2p-54, AL2p-55, AL2p-56, AL2p-57, AL2p-58, AL2p-59, AL2p-60, AL2p-61, or AL2p-62 (as shown in Tables 9A to 9C). In some embodiments, the antibody comprises a heavy chain variable region and a light chain variable region, wherein the heavy chain variable region comprises the HVR-H I, HVR-H2, and HVR-H3 of antibody AL2p-2, AL2p-3, AL2p-4, AL2p-7, AL2p-8, AL2p-9, AL2p-10, AL2p-11, AL2p-12, AL2p-13, AL2p-14, AL2p-15, AL2p-16, AL2p-17, AL2p-18, AL2p-19, AL2p-20, AL2p-21, AL2p-22, AL2p-23, AL2p-24, AL2p-25, AL2p-26, AL2p-27, AL2p-28, AL2p-29, AL2p-30, AL2p-31, AL2p-32, AL2p-35, AL2p-36, AL2p-37, AL2p-38, AL2p-39, AL2p-40, AL2p-41, AL2p-42, AL2p-43, AL2p-44, AL2p-45, AL2p-46, AL2p-47, AL2p-48, AL2p-49, AL2p-50, AL2p-51, AL2p-52, AL2p-53, AL2p-54, AL2p-55, AL2p-56, AL2p-57, AL2p-58, AL2p-59, AL2p-60, AL2p-61, or AL2p-62 (as shown in Tables 8A to 8C); and the light chain variable region comprises the HVR-L1. HVR-L2, and HVR-L3 of antibody AL2p-5, AL2p-6, AL2p-7, AL2p-8, AL2p-9, AL2p-10, AL2p-11, AL2p-12, AL2p-13, AL2p-14, AL2p-15, AL2p-16, AL2p-17, AL2p-18, AL2p-19, AL2p-20, AL2p-21, AL2p-22. AL2p-23, AL2p-24, AL2p-25, AL2p-26, AL2p-27, AL2p-28, AL2p-29, AL2p-30, AL2p-31, AL2p-32, AL2p-33, AL2p-38, AL2p-39, AL2p-40, AL2p-41, AL2p-42, AL2p-43, AL2p-44, AL2p-45 AL2p-46, AL2p-47, AL2p-48, AL2p-49, AL2p-50, AL2p-5I, AL2p-52, AL2p-53, AL2p-54, AL2p-55, AL2p-56, AL2p-57, AL2p-58, AL2p-59, AL2p-60, AL2p-61, or AL2p-62 (as shown in Tables 9A to 9C). In some embodiments, the antibody comprises a heavy chain variable region comprising an HVR-H1, HVR-H2, and HVR-H3 and a light chain variable region comprising an HVR-L1, HVR-L2, and HVR-L3, wherein the antibody comprises the HVR-H1, HVR-H2, HVR-H3, HVR-L1, HVR-L2. and HVR-L3 of antibody AL2p-2, AL2p-3, AL2p-4, AL2p-5, AL2p-6, AL2p-7, AL2p-8, AL2p-9, AL2p-10, AL2p-11, AL2p-12, AL2p-13, AL2p-14, AL2p-15, AL2p-16, AL2p-17, AL2p-18, AL2p-19, AL2p-20, AL2p-21, AL2p-22, AL2p-23, AL2p-24, AL2p-25, AL2p-26, AL2p-27, AL2p-28, AL2p-29, AL2p-30, AL2p-31, AL2p-32, AL2p-33, AL2p-35, AL2p-36, AL2p-37, AL2p-38, AL2p-39, AL2p-40, AL2p-41, AL2p-42, AL2p-43. AL2p-44, AL2p-45, AL2p-46, AL2p-47, AL2p-48, AL2p-49, AL2p-50, AL2p-51, AL2p-52, AL2p-53, AL2p-54, AL2p-55, AL2p-56, AL2p-57, AL2p-58, AL2p-59, AL2p-60, AL2p-61, or AL2p-62 (as shown in Tables 8A to 8C and 9A to 9C).

[0351] In some embodiments, the heavy chain variable region comprises one, two, three or four frame work regions selected from VH FRI, VH FR2, VH FR3, and VH FR4, wherein: the VH FRI comprises a sequence selected from the group consisting of SEQ ID NOs: 1716-1718, the VH FR2 comprises a sequence selected from the group consisting of SEQ ID NOs: 1719 and 1720, the VH FR3 comprises a sequence selected from the group consisting of SEQ ID NOs: 1721 and 1722, and the VH FR4 comprises the sequence of SEQ ID NO: 1723; and/or the light chain variable region comprises one, two, three or four frame work regions selected from VL FRI. VL FR2, VL FR3, and VL FR4, wherein: the VL FRI comprises a sequence selected from the group consisting of SEQ ID NOs: 1724-1727, the VL FR2 comprises a sequence selected from the group consisting of SEQ ID NOs: 1728 and 1729, the VL FR3 comprises a sequence selected from the group consisting of SEQ ID NOs: 1730 and 1731, and the VL FR4 comprises a sequence selected from the group consisting of SEQ ID NOs: 1732 and 1733. In some embodiments, the antibody comprises a heavy chain variable region comprising an amino acid sequence selected from the group consisting of SEQ ID NOs: 1734-1777 and 1798; and/or a light chain variable region comprising an amino acid sequence selected from the group consisting of SEQ ID NOs: 1799-1820 and 1825. In some embodiments, the antibody comprises the heavy chain variable region of antibody AL2p-h50, AL2p-2. AL2p-3, AL2p-4, AL2p-5, AL2p-6. AL2p-7, AL2p-8, AL2p-9, AL2p-10, AL2p-11, AL2p-12, AL2p-13, AL2p-14, AL2p-15, AL2p-16, AL2p-17, AL2p-18, AL2p-19, AL2p-20, AL2p-21, AL2p-22, AL2p-23, AL2p-24, AL2p-25, AL2p-26, AL2p-27, AL2p-28, AL2p-29, AL2p-30, AL2p-31, AL2p-32, AL2p-33, AL2p-h77, AL2p-35, AL2p-36, AL2p-37, AL2p-38, AL2p-39, AL2p-40, AL2p-41, AL2p-42, AL2p-43, AL2p-44, AL2p-45, AL2p-46, AL2p-47, AL2p-48, AL2p-49, AL2p-50, AL2p-51, AL2p-52, AL2p-53, AL2p-54, AL2p-55, AL2p-56, AL2p-57, AL2p-58, AL2p-59, AL2p-60, AL2p-61, or AL2p-62 (as shown in Table 12A); and/or the antibody comprises the light chain variable region of antibody AL2p-h50, AL2p-2, AL2p-3. AL2p-4, AL2p-5, AL2p-6, AL2p-7. AL2p-8. AL2p-9, AL2p-10, AL2p-11, AL2p-12, AL2p-13, AL2p-14, AL2p-15, AL2p-16, AL2p-17, AL2p-18, AL2p-19, AL2p-20, AL2p-21, AL2p-22, AL2p-23, AL2p-24, AL2p-25, AL2p-26, AL2p-27, AL2p-28, AL2p-29, AL2p-30, AL2p-31, AL2p-32, AL2p-33, AL2p-h77, AL2p-35, AL2p-36, AL2p-37, AL2p-38, AL2p-39, AL2p-40, AL2p-41, AL2p-42, AL2p-43, AL2p-44, AL2p-45, AL2p-46, AL2p-47, AL2p-48, AL2p-49, AL2p-50, AL2p-5I, AL2p-52, AL2p-53, AL2p-54, AL2p-55, AL2p-56, AL2p-57, AL2p-58, AL2p-59, AL2p-60, AL2p-61, or AL2p-62 (as shown in Table 13A). In some embodiments: (a) the HVR-H1 comprises the amino acid sequence YAFSSQWMN (SEQ ID NO: 1839), the HVR-H2 comprises the amino acid sequence RIYPGGGDTNYARKFQG (SEQ ID NO: 1840), the HVR-H3 comprises the amino acid sequence ARLLRNQPGESYAMDY (SEQ ID NO: 1833), the HVR-L1 comprises the amino acid sequence RSSQSLVHSNGYTYLH (SEQ ID NO: 1837), the HVR-L2 comprises the amino acid sequence KVSNRRS (SEQ ID NO: 1841), and the HVR-L3 comprises the amino acid sequence SQSTRVPYT (SEQ ID NO: 1836); (b) the HVR-H1 comprises the amino acid sequence YAFSSQWMN (SEQ ID NO: 1839), the HVR-H2 comprises the amino acid sequence RIYPGGGDTNYAGKFQG (SEQ ID NO: 1842), the HVR-H3 comprises the amino acid sequence ARLLRNQPGESYAMDY (SEQ ID NO: 1833), the HVR-L1 comprises the amino acid sequence RSSQSLVHSNGYTYLH (SEQ ID NO: 1837), the HVR-L2 comprises the amino acid sequence KVSNRFS (SEQ ID NO: 1838), and the HVR-L3 comprises the amino acid sequence SQSTRVPYT (SEQ ID NO: 1836); (c) the HVR-H1 comprises the amino acid sequence YAFSSDWMN (SEQ ID NO: 1843), the HVR-H2 comprises the amino acid sequence RIYPGEGDTNYARKFHG (SEQ ID NO: 1844) the HVR-H3 comprises the amino acid sequence ARLLRNKPGESYAMDY (SEQ ID NO: 1845) the HVR-L1 comprises the amino acid sequence RTSQSLVHSNAYTYLH (SEQ ID NO: 1846), the HVR-L2 comprises the amino acid sequence KVSNRVS (SEQ ID NO: 1847). and the HVR-L3 comprises the amino acid sequence SQSTRVPYT (SEQ ID NO: 1836); (d) the HVR-H1 comprises the amino acid sequence YAFSSQWMN (SEQ ID NO: 1839), the HVR-H2 comprises the amino acid sequence RIYPGEGDTNYARKFQG (SEQ ID NO: 1848), the HVR-H3 comprises the amino acid sequence ARLLRNQPGESYAMDY (SEQ ID NO: 1833), the HVR-L1 comprises the amino acid sequence RSSQSLVHSNQYTYLH (SEQ ID NO: 1849), the HVR-L2 comprises the amino acid sequence KVSNRRS (SEQ ID NO: 1841), and the HVR-L3 comprises the amino acid sequence SQSTRVPYT (SEQ ID NO: 1836); (e) the HVR-H1 comprises the amino acid sequence YAFSSQWMN (SEQ ID NO: 1839), the HVR-H2 comprises the amino acid sequence RIYPGEGDTNYAGKFQG (SEQ ID NO: 1850). the HVR-H3 comprises the amino acid sequence ARLLRNQPGESYAMDY (SEQ ID NO: 1833), the HVR-L1 comprises the amino acid sequence RSSQSLVHSNQYTYLH (SEQ ID NO: 1849), the HVR-L2 comprises the amino acid sequence KVSNRFS (SEQ ID NO: 1838), and the HVR-L3 comprises the amino acid sequence SQSTRVPYT (SEQ ID NO: 1836); (f) the HVR-H1 comprises the amino acid sequence YAFSSQWMN (SEQ ID NO: 1839), the HVR-H2 comprises the amino acid sequence RIYPGGGDTNYAGKFQG (SEQ ID NO: 1842). the HVR-H3 comprises the amino acid sequence ARLLRNQPGESYAMDY (SEQ ID NO: 1833), the HVR-L1 comprises the amino acid sequence RSSQSLVHSNRYTYLH (SEQ ID NO: 1851), the HVR-L2 comprises the amino acid sequence KVSNRFS (SEQ ID NO: 1838), and the HVR-L3 comprises the amino acid sequence SQSTRVPYT (SEQ ID NO: 1836); or (g) the HVR-H1 comprises the amino acid sequence YAFSSQWMN (SEQ ID NO: 1839), the HVR-H2 comprises the amino acid sequence RIYPGGGDTNYARKFQG (SEQ ID NO: 1840), the HVR-H3 comprises the amino acid sequence ARLLRNQPGESYAMDY (SEQ ID NO: 1833), the HVR-L1 comprises the amino acid sequence RSSQSLVHSNRYTYLH (SEQ ID NO: 1851). the HVR-L2 comprises the amino acid sequence KVSNRRS (SEQ ID NO: 1841), and the HVR-L3 comprises the amino acid sequence SQSTRVPYT (SEQ ID NO: 1836). In some embodiments, the HVR-H1 comprises the amino acid sequence YAFSSQWMN (SEQ ID NO: 1839), the HVR-H2 comprises the amino acid sequence RIYPGGGDTNYARKFQG (SEQ ID NO: 1840), the HVR-H3 comprises the amino acid sequence ARLLRNQPGESYAMDY (SEQ ID NO: 1833), the HVR-L1 comprises the amino acid sequence RSSQSLVHSNGYTYLH (SEQ ID NO: 1837), the HVR-L2 comprises the amino acid sequence KVSNRRS (SEQ ID NO: 1841), and the HVR-L3 comprises the amino acid sequence SQSTRVPYT (SEQ ID NO: 1836). In some embodiments, the HVR-H1 comprises the amino acid sequence YAFSSQWMN (SEQ ID NO: 1839), the HVR-H2 comprises the amino acid sequence RIYPGGGDTNYAGKFQG (SEQ ID NO: 1842), the HVR-H3 comprises the amino acid sequence ARLLRNQPGESYAMDY (SEQ ID NO: 1833), the HVR-L1 comprises the amino acid sequence RSSQSLVHSNGYTYLH (SEQ ID NO: 1837), the HVR-L2 comprises the amino acid sequence KVSNRFS (SEQ ID NO: 1838), and the HVR-L3 comprises the amino acid sequence SQSTRVPYT (SEQ ID NO: 1836). In some embodiments, the HVR-H1 comprises the amino acid sequence YAFSSDWMN (SEQ ID NO: 1843), the HVR-H2 comprises the amino acid sequence RIYPGEGDTNYARKFHG (SEQ ID NO: 1844), the HVR-H3 comprises the amino acid sequence ARLLRNKPGESYAMDY (SEQ ID NO: 1845), the HVR-L1 comprises the amino acid sequence RTSQSLVHSNAYTYLH (SEQ ID NO: 1846), the HVR-L2 comprises the amino acid sequence KVSNRVS (SEQ ID NO: 1847), and the HVR-L3 comprises the amino acid sequence SQSTRVPYT (SEQ ID NO: 1836). In some embodiments, the HVR-H1 comprises the amino acid sequence YAFSSQWMN (SEQ ID NO: 1839), the HVR-H2 comprises the amino acid sequence RIYPGEGDTNYARKFQG (SEQ ID NO: 1848), the HVR-H3 comprises the amino acid sequence ARLLRNQPGESYAMDY (SEQ ID NO: 1833), the HVR-L1 comprises the amino acid sequence RSSQSLVHSNQYTYLH (SEQ ID NO: 1849), the HVR-L2 comprises the amino acid sequence KVSNRRS (SEQ ID NO: 1841), and the HVR-L3 comprises the amino acid sequence SQSTRVPYT (SEQ ID NO: 1836). In some embodiments, the HVR-H1 comprises the amino acid sequence YAFSSQWMN (SEQ ID NO: 1839), the HVR-H2 comprises the amino acid sequence RIYPGEGDTNYAGKFQG (SEQ ID NO: 1850), the HVR-H3 comprises the amino acid sequence ARLLRNQPGESYAMDY (SEQ ID NO: 1833), the HVR-L1 comprises the amino acid sequence RSSQSLVHSNQYTYLH (SEQ ID NO: 1849), the HVR-L2 comprises the amino acid sequence KVSNRFS (SEQ ID NO: 1838), and the HVR-L3 comprises the amino acid sequence SQSTRVPYT (SEQ ID NO: 1836). In some embodiments, the HVR-H1 comprises the amino acid sequence YAFSSQWMN (SEQ ID NO: 1839), the HVR-H2 comprises the amino acid sequence RIYPGGGDTNYAGKFQG (SEQ ID NO: 1842), the HVR-H3 comprises the amino acid sequence ARLLRNQPGESYAMDY (SEQ ID NO: 1833), the HVR-L1 comprises the amino acid sequence RSSQSLVHSNRYTYLH (SEQ ID NO: 1851), the HVR-L2 comprises the amino acid sequence KVSNRFS (SEQ ID NO: 1838), and the HVR-L3 comprises the amino acid sequence SQSTRVPYT (SEQ ID NO: 1836). In some embodiments, the HVR-H1 comprises the amino acid sequence YAFSSQWMN (SEQ ID NO: 1839), the HVR-H2 comprises the amino acid sequence RIYPGGGDTNYARKFQG (SEQ ID NO: 1840), the HVR-H3 comprises the amino acid sequence ARLLRNQPGESYAMDY (SEQ ID NO: 1833), the HVR-L1 comprises the amino acid sequence RSSQSLVHSNRYTYLH (SEQ ID NO: 1851), the HVR-L2 comprises the amino acid sequence KVSNRRS (SEQ ID NO: 1841), and the HVR-L3 comprises the amino acid sequence SQSTRVPYT (SEQ ID NO: 1836). In some embodiments, the HVR-H1 comprises the amino acid sequence YAFSSQWMN (SEQ ID NO: 1839), the HVR-H2 comprises the amino acid sequence RIYPGGGDTNYAGKFQG (SEQ ID NO: 1842), the HVR-H3 comprises the amino acid sequence ARLLRNQPGESYAMDY (SEQ ID NO: 1833), the HVR-L1 comprises the amino acid sequence RSSQSLVHSNRYTYLH (SEQ ID NO: 1851), the HVR-L2 comprises the amino acid sequence KVSNRFS (SEQ ID NO: 1838), and the HVR-L3 comprises the amino acid sequence SQSTRVPYT (SEQ ID NO: 1836).

[0352] In some embodiments, the antibody comprises a heavy chain variable region and a light chain variable region, wherein the heavy chain variable region comprises Kabat CDRs; and/or the light chain variable region comprises Kabat CDRs. In some embodiments, the heavy chain variable region comprises a CDR-H1 comprising the sequence of SQWMN (SEQ ID NO: 1901), a CDR-H2 comprising the sequence of RIYPGGGDTNYAGKFQG (SEQ ID NO: 1842); and a CDR-H3 comprising the sequence of LLRNQPGESYAMDY (SEQ ID NO: 1902). In some embodiments, the light chain variable region comprises a CDR-L1 comprising the sequence of RSSQSLVHSNGYTYLH (SEQ ID NO: 1837), a CDR-L2 comprising the sequence of KVSNRFS (SEQ ID NO: 1838); and a CDR-L3 comprising the sequence of SQSTRVPYT (SEQ ID NO: 1836). In some embodiments, the heavy chain variable region comprises a CDR-H1 comprising the sequence of SQWMN (SEQ ID NO: 1901), a CDR-H2 comprising the sequence of RIYPGGGDTNYAGKFQG (SEQ ID NO: 1842); and a CDR-H3 comprising the sequence of LLRNQPGESYAMDY (SEQ ID NO: 1902); and the light chain variable region comprises a CDR-L1 comprising the sequence of RSSQSLVHSNGYTYLH (SEQ ID NO: 1837), a CDR-L2 comprising the sequence of KVSNRFS (SEQ ID NO: 1838); and a CDR-L3 comprising the sequence of SQSTRVPYT (SEQ ID NO: 1836).

[0353] In some embodiments, the antibody comprises a heavy chain variable region and a light chain variable region, wherein the heavy chain variable region comprises Kabat CDRs; and/or the light chain variable region comprises Kabat CDRs. In some embodiments, the heavy chain variable region comprises a CDR-H1 comprising the sequence of SDWMN (SEQ ID NO: 1903), a CDR-H2 comprising the sequence of RIYPGEGDTNYARKFHG (SEQ ID NO: 1844); and a CDR-H3 comprising the sequence of LLRNKPGESYAMDY (SEQ ID NO: 1904). In some embodiments, the light chain variable region comprises a CDR-L1 comprising the sequence of RTSQSLVHSNAYTYLH (SEQ ID NO: 1846), a CDR-L2 comprising the sequence of KVSNRVS (SEQ ID NO: 1847); and a CDR-L3 comprising the sequence of SQSTRVPYT (SEQ ID NO: 1836). In some embodiments, the heavy chain variable region comprises a CDR-H1 comprising the sequence of SDWMN (SEQ ID NO: 1903), a CDR-H2 comprising the sequence of RIYPGEGDTNYARKFHG (SEQ ID NO: 1844); and a CDR-H3 comprising the sequence of LLRNKPGESYAMDY (SEQ ID NO: 1904); and the light chain variable region comprises a CDR-LI comprising the sequence of RTSQSLVHSNAYTYLH (SEQ ID NO: 1846), a CDR-L2 comprising the sequence of KVSNRVS (SEQ ID NO: 1847); and a CDR-L3 comprising the sequence of SQSTRVPYT (SEQ ID NO: 1836).

[0354] In some embodiments, the antibody comprises a heavy chain variable region and a light chain variable region, wherein the heavy chain variable region comprises Kabat CDRs; and/or the light chain variable region comprises Kabat CDRs. In some embodiments, the heavy chain variable region comprises a CDR-H1 comprising the sequence of SQWMN (SEQ ID NO: 1901), a CDR-H2 comprising the sequence of RIYPGGGDTNYAGKFQG (SEQ ID NO: 1842); and a CDR-H3 comprising the sequence of LLRNQPGESYAMDY (SEQ ID NO: 1902). In some embodiments, the light chain variable region comprises a CDR-L1 comprising the sequence of RSSQSLVHSNRYTYLH (SEQ ID NO: 1851), a CDR-L2 comprising the sequence of KVSNRFS (SEQ ID NO: 1838)1 and a CDR-L3 comprising the sequence of SQSTRVPYT (SEQ ID NO: 1836). In some embodiments, the heavy chain variable region comprises a CDR-H1 comprising the sequence of SQWMN (SEQ ID NO: 1901), a CDR-H2 comprising the sequence of RIYPGGGDTNYAGKFQG (SEQ ID NO: 1842); and a Kabat CDR-H3 comprising the sequence of LLRNQPGESYAMDY (SEQ ID NO: 1902); and the light chain variable region comprises a CDR-L1 comprising the sequence of RSSQSLVHSNRYTYLH (SEQ ID NO: 1851), a CDR-L2 comprising the sequence of KVSNRFS (SEQ ID NO: 1838); and a CDR-L3 comprising the sequence of SQSTRVPYT (SEQ ID NO: 1836).

[0355] In some embodiments, the antibody comprises a heavy chain variable region and a light chain variable region, wherein the heavy chain variable region comprises Kabat CDRs; and/or the light chain variable region comprises Kabat CDRs. In some embodiments, the heavy chain variable region comprises a CDR-H1 comprising the sequence of SQWMN (SEQ ID NO: 1901), a CDR-H2 comprising the sequence of RIYPGGGDTNYARKFQG (SEQ ID NO: 1840); and a CDR-H3 comprising the sequence of LLRNQPGESYAMDY (SEQ ID NO: 1902). In some embodiments, the light chain variable region comprises a CDR-L1 comprising the sequence of RSSQSLVHSNRYTYLH (SEQ ID NO: 1851), a CDR-L2 comprising the sequence of KVSNRRS (SEQ ID NO: 1841); and a CDR-L3 comprising the sequence of SQSTRVPYT (SEQ ID NO: 1836). In some embodiments, the heavy chain variable region comprises a CDR-H1 comprising the sequence of SQWMN (SEQ ID NO: 1901), a CDR-H2 comprising the sequence of RIYPGGGDTNYARKFQG(SEQ ID NO: 1840); and a CDR-H3 comprising the sequence of LLRNQPGESYAMDY (SEQ ID NO: 1902); and the light chain variable region comprises a CDR-L1 comprising the sequence of RSSQSLVHSNRYTYLH (SEQ ID NO: 1851), a CDR-L2 comprising the sequence of KVSNRRS (SEQ ID NO: 1841); and a CDR-L3 comprising the sequence of SQSTRVPYT (SEQ ID NO: 1836).

[0356] In some embodiments, the antibody comprises a heavy chain variable region and a light chain variable region, wherein the heavy chain variable region comprises Kabat CDRs; and/or the light chain variable region comprises Kabat CDRs. In some embodiments, the heavy chain variable region comprises a CDR-H1 comprising the sequence of SQWMN (SEQ ID NO: 1901), a CDR-H2 comprising the sequence of RIYPGEGDTNYARKFQG (SEQ ID NO: 1848); and a CDR-H3 comprising the sequence of LLRNQPGESYAMDY (SEQ ID NO: 1902). In some embodiments, the light chain variable region comprises a CDR-L1 comprising the sequence of RSSQSLVHSNQYTYLH (SEQ ID NO: 1849), a CDR-L2 comprising the sequence of KVSNRRS (SEQ ID NO: 1841); and a CDR-L3 comprising the sequence of SQSTRVPYT (SEQ ID NO: 1836). In some embodiments, the heavy chain variable region comprises a CDR-H1 comprising the sequence of SQWMN (SEQ ID NO: 1901), a CDR-H2 comprising the sequence of RIYPGEGDTNYARKFQG (SEQ ID NO: 1848); and a CDR-H3 comprising the sequence of LLRNQPGESYAMDY (SEQ ID NO: 1902); and the light chain variable region comprises a CDR-L1 comprising the sequence of RSSQSLVHSNQYTYLH (SEQ ID NO: 1849), a CDR-L2 comprising the sequence of KVSNRRS (SEQ ID NO: 1841); and a CDR-L3 comprising the sequence of SQSTRVPYT (SEQ ID NO: 1836).

[0357] In some embodiments, the antibody comprises a heavy chain variable region comprising an amino acid sequence selected from the group consisting of SEQ ID NOs: 1734-1778 and 1798; and/or a light chain variable region comprising an amino acid sequence selected from the group consisting of SEQ ID NOs: 1799-1820 and 1825. In some embodiments, the antibody comprises the heavy chain variable region of antibody AL2p-h50, AL2p-2, AL2p-3, AL2p-4, AL2p-5, AL2p-6, AL2p-7, AL2p-8, AL2p-9, AL2p-I0, AL2p-11, AL2p-I2, AL2p-13, AL2p-14, AL2p-15, AL2p-16, AL2p-17, AL2p-18, AL2p-19, AL2p-20, AL2p-21, AL2p-22, AL2p-23, AL2p-24, AL2p-25, AL2p-26, AL2p-27, AL2p-28, AL2p-29, AL2p-30, AL2p-31, AL2p-32, AL2p-33, AL2p-h77, AL2p-35, AL2p-36, AL2p-37, AL2p-38, AL2p-39, AL2p-40, AL2p-41, AL2p-42, AL2p-43, AL2p-44, AL2p-45, AL2p-46, AL2p-47, AL2p-48, AL2p-49, AL2p-50, AL2p-51, AL2p-52, AL2p-53, AL2p-54, AL2p-55, AL2p-56, AL2p-57, AL2p-58, AL2p-59, AL2p-60, AL2p-61, or AL2p-62 (as shown in Table 12A); and/or the antibody comprises the light chain variable region of antibody AL2p-h50, AL2p-2, AL2p-3, AL2p-4, AL2p-5, AL2p-6, AL2p-7, AL2p-8, AL2p-9, AL2p-10, AL2p-11, AL2p-12, AL2p-13, AL2p-14, AL2p-15, AL2p-16, AL2p-17, AL2p-18, AL2p-19, AL2p-20, AL2p-21, AL2p-22, AL2p-23, AL2p-24, AL2p-25, AL2p-26, AL2p-27, AL2p-28, AL2p-29, AL2p-30, AL2p-31, AL2p-32, AL2p-33, AL2p-h77, AL2p-35, AL2p-36, AL2p-37, AL2p-38, AL2p-39, AL2p-40, AL2p-41, AL2p-42, AL2p-43, AL2p-44, AL2p-45, AL2p-46, AL2p-47, AL2p-48, AL2p-49, AL2p-50, AL2p-51, AL2p-52, AL2p-53, AL2p-54, AL2p-55, AL2p-56, AL2p-57, AL2p-58, AL2p-59, AL2p-60, AL2p-61, or AL2p-62 (as shown in Table 13A). In some embodiments: (a) the heavy chain variable region comprises the amino acid sequence of SEQ ID NO: 1760, and/or the light chain variable region comprises the amino acid sequence of SEQ ID NO: 1804; (b) the heavy chain variable region comprises the amino acid sequence of SEQ ID NO: 1766; and/or the light chain variable region comprises the amino acid sequence of SEQ ID NO: 1811; (c) the heavy chain variable region comprises the amino acid sequence of SEQ ID NO: 1771; and/or the light chain variable region comprises the amino acid sequence of SEQ ID NO: 1815; (d) the heavy chain variable region comprises the amino acid sequence of SEQ ID NO: 1777; and/or the light chain variable region comprises the amino acid sequence of SEQ ID NO: 1817; (e) the heavy chain variable region comprises the amino acid sequence of SEQ ID NO: 1778; and/or the light chain variable region comprises the amino acid sequence of SEQ ID NO: 1818; (f) the heavy chain variable region comprises the amino acid sequence of SEQ ID NO: 1766; and/or the light chain variable region comprises the amino acid sequence of SEQ ID NO: 1819; or (g) the heavy chain variable region comprises the amino acid sequence of SEQ ID NO: 1760; and/or the light chain variable region comprises the amino acid sequence of SEQ ID NO: 1820. In some embodiments, the antibody comprises an Fc region comprising an amino acid sequence selected from the group consisting of SEQ ID Nos: 1853-1863. In some embodiments, the antibody comprises an Fe region comprising the amino acid sequence of SEQ ID NO: 1853. In some embodiments, the antibody comprises an Fc region comprising the amino acid sequence of SEQ ID NO: 1854. In some embodiments, the antibody comprises an Fc region comprising the amino acid sequence of SEQ ID NO: 1855. In some embodiments, the antibody comprises an Fc region comprising the amino acid sequence of SEQ ID NO: 1856. In some embodiments, the antibody comprises an Fc region comprising the amino acid sequence of SEQ ID NO: 1857. In some embodiments, the antibody comprises an Fc region comprising the amino acid sequence of SEQ ID NO: 1858. In some embodiments, the antibody comprises an Fc region comprising the amino acid sequence of SEQ ID NO: 1859. In some embodiments, the antibody comprises an Fc region comprising the amino acid sequence of SEQ ID NO: 1860. In some embodiments, the antibody comprises an Fc region comprising the amino acid sequence of SEQ ID NO: 1861. In some embodiments, the antibody comprises an Fc region comprising the amino acid sequence of SEQ ID NO: 1862. In some embodiments, the antibody comprises an Fc region comprising the amino acid sequence of SEQ ID NO: 1863. In some embodiments, the antibody comprises a heavy chain comprising an amino acid sequence selected from the group consisting of SEQ ID NOs: 1905-1920; and/or a light chain comprising an amino acid sequence selected from the group consisting of SEQ ID NOs: 1921-1925. In some embodiments, the antibody comprises a heavy chain comprising an amino acid sequence selected from the group consisting of SEQ ID NOs: 1905 and 1906; and a light chain comprising the amino acid sequence of SEQ ID NO: 1921. In some embodiments, the antibody comprises a heavy chain comprising an amino acid sequence selected from the group consisting of SEQ ID NOs: 1907 and 1908; and a light chain comprising the amino acid sequence of SEQ ID NO: 1921. In some embodiments, the antibody comprises a heavy chain comprising an amino acid sequence selected from the group consisting of SEQ ID NOs: 1909 and 1910; and a light chain comprising the amino acid sequence of SEQ ID NO: 1922. In some embodiments, the antibody comprises a heavy chain comprising an amino acid sequence selected from the group consisting of SEQ ID NOs: 1911 and 1912; and a light chain comprising the amino acid sequence of SEQ ID NO: 1922. In some embodiments, the antibody comprises a heavy chain comprising an amino acid sequence selected from the group consisting of SEQ ID NOs: 1913 and 1914; and a light chain comprising the amino acid sequence of SEQ ID NO: 1923. In some embodiments, the antibody comprises a heavy chain comprising an amino acid sequence selected from the group consisting of SEQ ID NOs: 1915 and 1916; and a light chain comprising the amino acid sequence of SEQ ID NO: 1925. in some embodiments, the antibody comprises a heavy chain comprising an amino acid sequence selected from the group consisting of SEQ ID NOs: 1917 and 1918; and a light chain comprising the amino acid sequence of SEQ ID NO: 1925. In some embodiments, the antibody comprises a heavy chain comprising an amino acid sequence selected from the group consisting of SEQ ID NOs: 1919 and 1920; and a light chain comprising the amino acid sequence of SEQ ID NO: 1924.

[0358] In some embodiments, the heavy chain variable region comprises the amino acid sequence of SEQ ID NO: 1760, and/or the light chain variable region comprises the amino acid sequence of SEQ ID NO: 1804. In some embodiments, the heavy chain variable region comprises the amino acid sequence of SEQ ID NO: 1766; and/or the light chain variable region comprises the amino acid sequence of SEQ ID NO: 1811. In some embodiments, the heavy chain variable region comprises the amino acid sequence of SEQ ID NO: 1771; and/or the light chain variable region comprises the amino acid sequence of SEQ ID NO: 1815. In some embodiments, the heavy chain variable region comprises the amino acid sequence of SEQ ID NO: 1777; and/or the light chain variable region comprises the amino acid sequence of SEQ ID NO: 1817. In some embodiments, the heavy chain variable region comprises the amino acid sequence of SEQ ID NO: 1778; and/or the light chain variable region comprises the amino acid sequence of SEQ ID NO: 1718. In some embodiments, the heavy chain variable region comprises the amino acid sequence of SEQ ID NO: 1766; and/or the light chain variable region comprises the amino acid sequence of SEQ ID NO: 1819. In some embodiments, the heavy chain variable region comprises the amino acid sequence of SEQ ID NO: 1760; and/or the light chain variable region comprises the amino acid sequence of SEQ ID NO: 1820.

[0359] In some embodiments, the antibody comprises a heavy chain variable region comprising an amino acid sequence selected from the group consisting of SEQ ID NOs: 1734, 1763 and 1779-1797; and/or a light chain variable region comprising an amino acid sequence selected from the group consisting of SEQ ID NOs: 1799, 1811, and 1821-1824. In some embodiments, the antibody comprises the heavy chain variable region of antibody AL2p-h19, AL2p-h21, AL2p-h22, AL2p-h23, AL2p-h24, AL2p-h25, AL2p-h26, AL2p-h27, AL2p-h28, AL2p-h29, AL2p-h30, AL2p-h31, AL2p-h32, AL2p-h33, AL2p-h34, AL2p-1135, AL2p-h36, AL2p-h42, AL2p-h43, AL2p-h44, AL2p-h47, AL2p-h59, AL2p-h76, or AL2p-h90 (as shown in Table 12A); and/or the antibody comprises the light chain variable region of antibody AL2p-h19, AL2p-h21, AL2p-h22, AL2p-h23, AL2p-h24, AL2p-h25, AL2p-h26, AL2p-h27, AL2p-h28, AL2p-h29, AL2p-h30, AL2p-h31, AL2p-h32, AL2p-h33, AL2p-h34, AL2p-h35, AL2p-h36, AL2p-h42, AL2p-h43, AL2p-h44, AL2p-h47, AL2p-h59, AL2p-h76, or AL2p-h90 (as shown in Table 13A).

[0360] In some embodiments, the antibody comprises a heavy chain comprising an amino acid sequence selected from the group consisting of SEQ ID NOs: 1905-1920; and/or a light chain comprising an amino acid sequence selected from the group consisting of SEQ ID NOs: 1921-1925. In some embodiments, the antibody comprises a heavy chain comprising an amino acid sequence selected from the group consisting of SEQ ID NOs: 1905 and 1906; and a light chain comprising the amino acid sequence of SEQ ID NO: 1921. In some embodiments, the antibody comprises a heavy chain comprising an amino acid sequence selected from the group consisting of SEQ ID NOs: 1907 and 1908; and a light chain comprising the amino acid sequence of SEQ ID NO: 1921. In some embodiments, the antibody comprises a heavy chain comprising an amino acid sequence selected from the group consisting of SEQ ID NOs: 1909 and 1910; and a light chain comprising the amino acid sequence of SEQ ID NO: 1922. In some embodiments, the antibody comprises a heavy chain comprising an amino acid sequence selected from the group consisting of SEQ ID NOs: 1911 and 1912; and a light chain comprising the amino acid sequence of SEQ ID NO: 1922. In some embodiments, the antibody comprises a heavy chain comprising an amino acid sequence selected from the group consisting of SEQ ID NOs: 1913 and 1914; and a light chain comprising the amino acid sequence of SEQ ID NO: 1923. In some embodiments, the antibody comprises a heavy chain comprising an amino acid sequence selected from the group consisting of SEQ ID NOs: 1915 and 1916; and a light chain comprising the amino acid sequence of SEQ ID NO: 1925. In some embodiments, the antibody comprises a heavy chain comprising an amino acid sequence selected from the group consisting of SEQ ID NOs: 1917 and 1918; and a light chain comprising the amino acid sequence of SEQ ID NO: 1925. In some embodiments, the antibody comprises a heavy chain comprising an amino acid sequence selected from the group consisting of SEQ ID NOs: 1919 and 1920; and a light chain comprising the amino acid sequence of SEQ ID NO: 1924.

[0361] In some embodiments that may be combined with any of the preceding embodiments, the antibody is a bispecific antibody recognizing a first antigen and a second antigen, wherein the first antigen is human TREM2 or a naturally occurring variant thereof, and the second antigen is: (a) an antigen facilitating transport across the blood-brain-barrier; (b) an antigen facilitating transport across the blood-brain-barrier selected from the group consisting of transferrin receptor (TR), insulin receptor (HIR), insulin-like growth factor receptor (IGFR), low-density lipoprotein receptor related proteins 1 and 2 (LPR-1 and 2), diphtheria toxin receptor, CRM197, a llama single domain antibody, TMEM 30(A), a protein transduction domain, TAT, Syn-B, penetratin, a poly-arginine peptide, an angiopeptide, and ANG1005; (c) a disease-causing agent selected from the group consisting of disease-causing peptides or proteins or, disease-causing nucleic acids, wherein the disease-causing nucleic acids are antisense GGCCCC (G2C4) repeat-expansion RNA, the disease-causing proteins are selected from the group consisting of amyloid beta, oligomeric amyloid beta, amyloid beta plaques, amyloid precursor protein or fragments thereof, Tau, TAPP, alpha-synuclein, TDP-43, FUS protein, C9orf72 (chromosome 9 open reading frame 72), c9RAN protein, prion protein, PrPSc, huntingtin, calcitonin, superoxide dismutase, ataxin, ataxin 1, ataxin 2, ataxin 3, ataxin 7, ataxin 8, ataxin 10, Lewy body, atrial natriuretic factor, islet amyloid polypeptide, insulin, apolipoprotein AI, serum amyloid A, medin, prolactin, transthyretin, lysozyme, beta 2 microglobulin, gelsolin, keratoepithelin, cystatin, immunoglobulin light chain AL, S-IBM protein, Repeat-associated non-ATG (RAN) translation products, DiPeptide repeat (DPR) peptides, glycine-alanine (GA) repeat peptides, glycine-proline (GP) repeat peptides, glycine-arginine (GR) repeat peptides, proline-alanine (PA) repeat peptides, ubiquitin, and proline-arginine (PR) repeat peptides; (d) ligands and/or proteins expressed on immune cells, wherein the ligands and/or proteins selected from the group consisting of CD40, OX40, ICOS, CD28, CD137/4-1BB, CD27, GITR, PD-L1, CTLA-4, PD-L2, PD-1, B7-H3, B7-H4, HVEM, BTLA, KIR, GAL9, TIM3, A2AR, LAG-3, and phosphatidylserine; and (e) a protein, lipid, polysaccharide, or glycolipid expressed on one or more tumor cells. In some embodiments, the antibody binds specifically to both human TREM2 and cynomolgus monkey TREM2. In some embodiments, the antibody has a dissociation constant (K_{D}) for human TREM2 and/or cynomolgus monkey TREM2 that is at least 1-fold lower than an anti-TREM2 antibody comprising a heavy chain variable region comprising the amino acid sequence of SEQ ID NO: 1734 and a light chain variable region comprising the amino acid sequence of SEQ ID NO: 1763; or at least 1-fold lower than an anti-TREM2 antibody comprising a heavy chain variable region comprising the amino acid sequence of SEQ ID NO: 1798 and a light chain variable region comprising the amino acid sequence of SEQ ID NO: 1810. In some embodiments, the antibody has a dissociation constant (K_{D}) for human TREM2 that ranges from about 9 μM to about 100 pM, or less than 100 pM, wherein the K_{D} is determined at a temperature of approximately 25° C. In some embodiments, the antibody has a dissociation constant (K_{D}) for cynomolgus monkey TREM2 that ranges from about 50 nM to about 100 pM, or less than 100 pM, wherein the K_{D} is determined at a temperature of approximately 25° C. In some embodiments, the antibody binds to primary human immune cells with an affinity that is at least 10 times higher than that of an anti-TREM2 antibody comprising a heavy chain variable region comprising the amino acid sequence of SEQ ID NO: 1734 and a light chain variable region comprising the amino acid sequence of SEQ ID NO: 1763; or at least 10 times higher than an anti-TREM2 antibody comprising a heavy chain variable region comprising the amino acid sequence of SEQ ID NO: 1798 and a light chain variable region comprising the amino acid sequence of SEQ ID NO: 1810. In some embodiments, the antibody clusters and activates TREM2 signaling in an amount that is at least 1-fold greater than that of an anti-TREM2 antibody comprising a heavy chain variable region comprising the amino acid sequence of SEQ ID NO: 1734 and a light chain variable region comprising the amino acid sequence of SEQ ID NO: 1763; or at least 1-fold greater than an anti-TREM2 antibody comprising a heavy chain variable region comprising the amino acid sequence of SEQ ID NO: 1798 and a light chain variable region comprising the amino acid sequence of SEQ ID NO: 1810. In some embodiments, the antibody increases immune cell survival in vitro that to an extent that is greater than an anti-TREM2 antibody comprising a heavy chain variable region comprising the amino acid sequence of SEQ ID NO: 1734 and a light chain variable region comprising the amino acid sequence of SEQ ID NO: 1763; or that is greater than an anti-TREM2 antibody comprising a heavy chain variable region comprising the amino acid sequence of SEQ ID NO: 1798 and a light chain variable region comprising the amino acid sequence of SEQ ID NO: 1810. In some embodiments, the antibody has an in vivo half-life that is lower than a human control IgG1 antibody. In some embodiments, the antibody decreases plasma levels of soluble TREM2 in vivo by an amount that is at least 25% greater than that of a human control IgG1 antibody. In some embodiments, the antibody decreases plasma levels of soluble TREM2 in vivo by blocking cleavage, by inhibiting one or more metalloproteases, and/or by inducing internalization. In some embodiments, soluble TREM2 is decreased by about any of 10, 20, 30, 40, or 50%. In some embodiments, the antibody competes with one or more antibodies selected from the group consisting of AL2p-h50, AL2p-2, AL2p-3, AL2p-4, AL2p-5, AL2p-6, AL2p-7, AL2p-8, AL2p-9, AL2p-10, AL2p-11, AL2p-12, AL2p-13, AL2p-14, AL2p-15, AL2p-16, AL2p-17, AL2p-18, AL2p-19, AL2p-20, AL2p-21, AL2p-22, AL2p-23, AL2p-24, AL2p-25, AL2p-26, AL2p-27, AL2p-28, AL2p-29, AL2p-30, AL2p-31, AL2p-32, AL2p-33, AL2p-h77, AL2p-35, AL2p-36, AL2p-37, AL2p-38, AL2p-39, AL2p-40, AL2p-41, AL2p-42, AL2p-43, AL2p-44, AL2p-45, AL2p-46, AL2p-47, AL2p-48, AL2p-49, AL2p-50, AL2p-51, AL2p-52, AL2p-53, AL2p-54, AL2p-55, AL2p-56, AL2p-57, AL2p-58, AL2p-59, AL2p-60, AL2p-61, AL2p-62, AL2p-h19, AL2p-h21, AL2p-h22, AL2p-h23, AL2p-h24, AL2p-h25, AL2p-h26, AL2p-h27, AL2p-h28, AL2p-h29, AL2p-h30, AL2p-h31, AL2p-h32, AL2p-h33, AL2p-h34, AL2p-h35, AL2p-h36, AL2p-h42, AL2p-h43, AL2p-h44, AL2p-h47, AL2p-1159, AL2p-h76, AL2p-h90, and any combination thereof for binding to TREM2. In some embodiments, the antibody binds essentially the same TREM2 epitope as an antibody selected from the group consisting of: AL2p-h50, AL2p-2, AL2p-3, AL2p-4, AL2p-5, AL2p-6, AL2p-7, AL2p-8, AL2p-9, AL2p-10, AL2p-11, AL2p-12, AL2p-13, AL2p-14, AL2p-15, AL2p-16, AL2p-17, AL2p-18, AL2p-19, AL2p-20, AL2p-21, AL2p-22, AL2p-23, AL2p-24, AL2p-25, AL2p-26, AL2p-27, AL2p-28, AL2p-29, AL2p-30, AL2p-31, AL2p-32, AL2p-33, AL2p-h77, AL2p-35, AL2p-36, AL2p-37, AL2p-38, AL2p-39, AL2p-40, AL2p-41, AL2p-42, AL2p-43, AL2p-44, AL2p-45, AL2p-46, AL2p-47, AL2p-48, AL2p-49, AL2p-50, AL2p-51, AL2p-52, AL2p-53, AL2p-54, AL2p-55, AL2p-56, AL2p-57, AL2p-58, AL2p-59, AL2p-60, AL2p-61, AL2p-62, AL2p-h19, AL2p-h21, AL2p-h22, AL2p-h23, AL2p-h24, AL2p-h25, AL2p-h26, AL2p-h27, AL2p-h28, AL2p-h29, AL2p-h30, AL2p-h31, AL2p-h32, AL2p-h33, AL2p-h34, AL2p-h35, AL2p-h36, AL2p-h42, AL2p-h43, AL2p-h44, AL2p-h47, AL2p-h59, AL2p-h76, and AL2p-h90. In some embodiments, the antibody binds to one or more amino acids within amino acid residues 149-157 of SEQ TD NO: 1. In some embodiments, the antibody binds to one or more amino acid residues selected from the group consisting of E151, D152, and E156 of SEQ TD NO: 1.

[0362] In some embodiments, the antibody is an antibody disclosed in Tables 2A, 2B3, 2C, 3A, 3B, 3C, 4A-4D, 5A-5D, 6A, 6B3, 7A or 7B of PCT Patent Application Publication No. WO2019/028292A1, reproduced below as Tables 8A-8C, 9A-9C, 10A-10D, 11A-11D, 12A, 12B, 13A and 13B.

TABLE 8A
Heavy chain HVR H1 sequences of anti-TREM2
antibodies

| Ab | HVR H1 | SEQ ID NO: |
|---|---|---|
| AL2p-h50, AL2p-2, | YAFSSSWMN | 1831 |
| AL2p-3, AL2p-4, | | |
| AL2p-5, AL2p-6, | | |
| AL2p-33, AL2p-h77, | | |
| and AL2p-36 | | |
| AL2p-29, AL2p-30, | YAFSSQWMN | 1839 |
| AL2p-31, AL2p-37, | | |
| AL2p-58, AL2p-60, | | |
| AL2p-61, and | | |
| AL2p-62 | | |
| AL2p-10, AL2p-11, | YAFSSDWMN | 1843 |
| AL2p-45, AL2p-46, | | |
| AL2p-47, AL2p-48, | | |
| and AL2p-49 | | |
| AL2p-7 and AL2p-8 | YAFSLSWMN | 1864 |
| AL2p-9 | YAFSRSWMN1865 | |
| AL2p-12, AL2p-13, | YAFSSHWMN | 1866 |
| AL2p-14, AL2p-15, | | |
| AL2p-16, AL2p-17, | | |
| AL2p-18, AL2p-19, | | |
| AL2p-20, AL2p-21, | | |
| AL2p-22, AL2p-23, | | |
| AL2p-24, AL2p-25, | | |
| AL2p-26, AL2p-27, | | |
| AL2p-28, AL2p-38, | | |
| AL2p-39, AL2p-40, | | |
| AL2p-41, AL2p-42, | | |
| AL2p-43, AL2p-44, | | |
| AL2p-50, AL2p-51, | | |
| AL2p-52, AL2p-53, | | |
| AL2p-54, AL2p-55, | | |
| AL2p-56, AL2p-57, | | |
| and AL2p-59 | | |
| AL2p-32 | YAFSSEWMN | 1867 |
| AL2P-35 | YAFWSSWMN | 1868 |
| | YAFX₁X₂X₃WMN | 1828 |
| Formula I | X₁ is S or W | |
| | X₂ is S, L, or R | |
| | X₃ is Sf D, H, | |
| | Q, or E | |

TABLE 8B
Heavy chain HVR 112 sequences of anti-TREM2 antibodies

| Ab | HVR H2 | SEQ ID NO: |
|---|---|---|
| AL2p-h50, AL2p-5, AL2p-6, | RIYPGDGDTNYAQKFQG | 1832 |
| AL2p-9, AL2p-10, AL2p-14, | | |
| AL2p-15, AL2p-29, AL2p-32, | | |
| AL2p-33, AL2p-h77, and AL2p- | | |
| 35 | | |
| AL2p-31 and AL2p-60 | RIYPGGGDTNYARKFQG | 1840 |
| AL2p-37 and AL2p-58 | RIYPGGGDTNYAGKFQG | 1842 |
| AL2p47, AL2p-48, AL2p-49 | RIYPGEGDTNYARKFHG | 1844 |
| AL2p-45, AL2p46, and AL2p-61 | RIYPGEGDTNYARKFQG | 1848 |
| AL2p-62 | RIYPGEGDTNYAGKFQG | 1850 |
| AL2p-2 and AL2p-24 | RIYPGGGDTNYAQKFQG | 1869 |
| AL2p-3 | RIYPGEGDTNYAQKFQG | 1870 |
| AL2p-4 and AL2p-27 | RIYPGQGDTNYAQKFQG | 1871 |
| AL2p-7 and AL2p-16 | RIYPGDGDTNYAQK FRG | 1872 |
| AL2p-8, AL2p-11, AL2p-19, | RIYPGDGDTNYARKFQG | 1873 |
| AL2p-20, and AL2p-36 | | |
| AL2p-12 | RIYPGDGDTNYAHK.FQG | 1874 |
| AL2p-13 | RIYPGDGDTNYAQKFKG | 1875 |
| AL2p-17 | RIYPGDGDTNYAQKRQG | 1876 |
| AL2p-18 | RIYPGDGDTNYAQKWQG | 1877 |
| AL2p-21 and AL2p-30 | RIYPGDGDTNYAWKFQG | 1878 |
| AL2p-22 | RIYPGDGDTNYAYKFQG | 1879 |
| AL2p-23 | RIYPGDGQTNYAQKRQG | 1880 |
| AL2p-25, AL2p-38, AL2p-39, | RIYPGGGDTNYAQKFRG | 1881 |
| and AL2p-40 | | |
| AL2p-26 | RIYPGGGDTNYAQKRQG | 1882 |
| AL2p-28 | RIYPGVGDTNYAQKFQG | 1883 |
| AL2p-41 and AL2p-42 | RIYPGEGDTNYAQKFRG | 1884 |
| AL2p-43 and AL2p44 | RIYPGGGDTNYARKFRG | 1885 |
| AL2p-50, AL2p-51, AL2p-52, | RIYPGEGDTNYAQKFHG | 1886 |
| AL2p-53, AL2p-54, AL2p-55, | | |
| AL2p-56, and AL2p-57 | | |
| AL2p-59 | RIYPGEGQTNYAQKRQG | 1887 |
| Formula II | RIYPGX1GX2TNYAX₃KX₄X₅ | 1829 |
| | G | |
| | X₁ is D, G, E, Q, or | |
| | V | |
| | X₂ is D or Q | |
| | X₃ is Q, R, H, W, Y, | |
| | or G | |
| | X₄ is F, R, or W | |
| | X₅ is Q, R, K, or H | |

TABLE 8C
Heavy chain HVR H3 sequences of anti-TREM2 antibodies

| Ab | HVR 113 | SEQ ID NO: |
|---|---|---|
| AL2p-h50, AL2p-2, AL2p-3, | ARLLRNQPGESYAMDY | 1833 |
| AL2p-4, AL2p-5, AL2p-6, | | |
| AL2p-7, AL2p-10, AL2p-11, | | |
| AL2p-12, AL2p-13, AL2p-14. | | |
| A L2p-15,, Al2p-17, AL2p-19, | | |
| AL2p-20, AL2p-21, AL2p-22, | | |
| AL2p-23, AL2p-24, AL2p-25, | | |
| AL2p-26, AL2p-27, AL2p- | | |
| 28, AL2p-29, AL2p-30. | | |
| AL2p-3 1, AL2p-32, AL2p- | | |
| 33, AL2p-h77, AL2p-37, | | |
| AL2p-45, AL2p-46, AL2p-47, | ARLLRNKPGESYAMDY | 1845 |
| AL2p-48, AL2p-49, AL2p-54, | | |
| AL2p-55, AL2p-56, and | | |
| AL2p-57 | | |
| AL2p-8 and AL2p-18 | ARLLRNQPGSSYAMDY | 1888 |
| AL2p-9, AL2p-16, AL2p-36, | ARLLRNQPGASYAMDY | 1889 |
| AL2p-38, AL2p-39, AL2p-40, | | |
| AL2p-41, AL2p-42, AL2p-43, | | |
| and AL2p-44 | | |
| AL2p-35 | ARLLRNQPGESYAHDY | 1890 |
| Formula III | ARLLRNX₁PGX₂SYAX₃DY | 1830 |
| | X₁ is Q or K | |
| | X₂ is E, S, or A | |
| | X₃ is M or H | |

TABLE 9A
Light chain HVR LI sequences of anti-TREM2 antibodies

| Ab | HVR L1 | SEQ ID NO: |
|---|---|---|
| AL2p-h50, AL2p-2, AL2p-3, | RSSQSLVHSNGYTYLH | 1837 |
| AL2p-4, AL2p-10, AL2p-12, | | |
| AL2p-31, AL2p-32, AL2p-h77, | | |
| AL2p-35, AL2p-36. and AL2p-37 | | |
| AL2p-45, AL2p-47, AL2p-50. | RTSQSLVHSNAYTYLH | 1846 |
| AL2p-52, AL2p-55, and AL2p-56 | | |
| AL2p-61 and AL2p-62 | RSSQSLVHSNQYTYLH | 1849 |
| AL2p-5, AL2p-58, and AL2p- | RSSQSLVHSNRYTYLH | 1851 |
| AL2p-6 | RSSQSLVHSNWYTYLH | 1891 |
| AL2p-7, AL2p-8, AL2p-13, and | RSSQSLIHSNGYTYLH | 1892 |
| AL2p-9, AL2p-16, AL2p-18. | RTSQSLVHSNGYTYLH | 1893 |
| AL2p-20, AL2p-23, AL2p-25, | | |
| AL2p-28, and AL2p-33 | | |
| AL2p-11, AL2p-14, AL2p-17, | RSSRSLVHSNGYTYLH | 1894 |
| AL2p-19, AL2p-22, AL2p-24, | | |
| AL2p-27, and AL2p-29 | | |
| AL2p-15, AL2p-21, and | RSSSSLVHSNGYTYLH | 1895 |
| AL2p-38 and AL2p-43 | RSSRSLVHSNRYTYLH | 1896 |
| AL2p-39 and AL2p-41 | RSSRSLVHSNQYTYLH | 1897 |
| AL2p-40, AL2p-42, and AL2p-44 | RTSRSLVHSNRYTYLH | 1898 |
| AL2p-46, AL2p-48, AL2p-49, | RTSQSLVHSNQYTYLH | 1899 |
| AL2p-51, AL2p-53, AL2p-54, | | |
| AL2p-57, and AL2p-59 | | |
| Formula IV | RX₁SX₂SLX₃HSNX₄YTYLH | 1834 |
| | X₁ is S or T | |
| | X₂ is Q, R, or S | |
| | X₃ is V or I | |
| | X₄ is G, R, W, Q or A | |

TABLE 9B
Light chain HVR L2 sequences of anti-TREM2 antibodies

| Ab | HVR L2 | SEQ ID NO: |
|---|---|---|
| AL2p-h50, AL2p-2, AL2p-3, | KVSNRFS | 1838 |
| AL2p-4, AL2p-5, AL2p-6, AL2p- | | |
| 14, AL2p-24, AL2p-29, AL2p- | | |
| h77, AL2p-35, AL2p-36, AL2p- | | |
| 37, AL2p-58, and AL2p-62 | | |
| AL2p-7, AL2p-8, AL2p-10, AL2p-12, | KVSNRRS | 1841 |
| AL2p-13, AL2p-22, AL2p-26, AL2p- | | |
| 31, AL2p-32, AL2p-38, AL2p-39. | | |
| AL2p-40, AL2p-41, AL2p-42, AL2p- | | |
| 43, AL2p-44, AL2p-60, and AL2p-61 | | |
| AL2p-9, AL2p-11, AL2p-16, AL2p- | KVSNRVS1847 | |
| 17, AL2p-18, AL2p-19, AL2p-20, | | |
| AL2p-23, AL2p-25, AL2p-27, AL2p- | | |
| 28, AL2p-33, AL2p-45, AL2p-46, | | |
| AL2p-47, AL2p-48, AL2p-49, | | |
| AL2p-50, AL2p-51, AL2p-52, AL2p- | | |
| 53, AL2p-54, AL2p-55, AL2p-56, | | |
| AL2p-57, and L2p-59 | | |
| AL2p-15, AL2p-21, and AL2p-30 | KVSNRKS | 1900 |
| Formula V | KVSNRX₁S | 1835 |
| | X₁ is F, R, V, or K | |

TABLE 9C
Light chain HVR L3 sequences of anti-TR FM2 antibodies

| Ab | HVR L3 | SEQ ID NO: |
|---|---|---|
| AL2p-h50, AL2p-2, AL2p-3, AL2p-4, AL2p- | SQSTRVPYT | 1836 |
| 5, AL2p-6, AL2p-7, AL2p-8, AL2p-9, | | |
| AL2p-10, AL2p-11, AL2p-12, AL2p-13, | | |
| AL2p-14, AL2p-15, AL2p-16, AL2p-17, | | |
| AL2p-18, AL2p-19, AL2p-20, AL2p-21, | | |
| AL2p-22, AL2p-23, AL2p-24, AL2p-25, | | |
| AL2p-26, AL2p-27, AL2p-28, AL2p-29, | | |
| AL2p-30, AL2p-31, AL2p-32, AL2p33, | | |
| AL2p-h77, AL2p-35, AL2p-36, AL2p-37, | | |
| AL2p-38, AL2p-39, AL2p-40, AL2p-41, | | |
| AL2p-42, AL2p-43, AL2p-44, AL2p-45, | | |
| AL2p-46, AL2p-47, AL2p-48, AL2p-49, | | |
| AL2p-50, AL2p-51, AL2p-52, AL2p-53, | | |
| AL2p-54, AL2p-55, AL2p-56, AL2p-57, | | |
| AL2p-58, AL2p-59, AL2p-60, AL2p-61, and | | |
| AL2p-62 | | |

TABLE 10A
Heavy chain framework I sequences of anti-TREM2 antibodies

| Ab | VH FR1 | SEQ ID NO: |
|---|---|---|
| AL2p-h50, AL2p-2, | QVQLVQSGAEVKKPGSSVKVSCKASG | 1716 |
| AL2p-3, AL2p-4, AL2p- | | |
| 5, AL2p-6, AL2p-7, | | |
| AL2p-8, AL2p-9, AL2p- | | |
| 10, AL2p-11, AL2p-12, | | |
| AL2p-13, AL2p-14, | | |
| AL2p-15, AL2p-16, | | |
| AL2p-17, AL2p-18, | | |
| AL2p-19, AL2p-20 | | |
| AL2p-21, AL2p-22, | | |
| AL2p-23, AL2p-24, | | |
| AL2p-25, AL2p-26, | | |
| AL2p-27, AL2p-28, | | |
| AL2p-29, AL2p-30, | | |
| [symbol] | | |
| AL2p-33. AL2p-49, | EVQLVQSGAEVKKPGSSVKVSCKASG | 1717 |
| AL2p-52. AL2p-53, | | |
| AL2p-55, AL2p-56, and | | |
| AL2p-h77, AL2p-35, | QVQLVQSGAEVKKPGASVKVSCKASG | 1718 |
| AL2p-36, AL2p-37. | | |
| AL2p-58. and AL2p-62 | | |

[symbol]

indicates data missing or illegible when filed

TABLE 10B
Heavy chain framework 2 sequences of anti-TREM2 antibodies

| Ab | VH FR2 | SEQ ID NO: |
|---|---|---|
| AL2p-h50, AL2p-2, AL2p-3, AL2p-4, | WVRQAPGQGLEWMG | 1719 |
| AL2p-5, AL2p-6, AL2p-7, AL2p-8, AL2p- | | |
| 9, AL2p-10, AL2p-11, AL2p-12, AL2p- | | |
| 13, AL2p-14, AL2p-15, AL2p-16, AL2p- | | |
| 17, AL2p-18, AL2p-19, AL2p-20, AL2p- | | |
| 21, AL2p-22, AL2p-23, AL2p-24, AL2p- | | |
| 25, AL2p-26, AL2p-27, AL2p-28, AL2p- | | |
| 29, AL2p-30, AL2p-31, AL2p-32, AL2p- | | |
| 33, AL2p-38, AL2p-39, AL2p-40, | | |
| AL2p-41, AL2p-42, AL2p-43, AL2p-44, | | |
| AL2p-45, AL2p-46, AL2p-47, AL2p48, | | |
| AL2p-49, AL2p-50, AL2p-51, AL2p- | | |
| 52, AL2p-53, AL2p-54, AL2p-55, | | |
| AL2p-56, AL2p-57, AL2p-59, AL2p- | | |
| 60, and AL2p-61 | | |
| AL2p-h77, AL2p-35, AL2p-36, AL2p-37, AL2p-58, | WVRQAPGQRLEWIG | 1720 |
| and AL2-62 | | |

TABLE 10C
Heavy chain framework 3 sequences of anti-TREM2 antibodies

| Ab | VH FR3 | SEQ ID NO: |
|---|---|---|
| AL2p-h50, AL2p-2, | RVTITADESTSTAYMELSSLRSEDTAVYYC | 1721 |
| AL2p-3. AL2p-4, | | |
| AL2p-5, AL2p-6, | | |
| AL2p-7, AL2p-8, | | |
| AL2p-9, AL2p-10, | | |
| AL2p-11, AL2p-12, | | |
| AL2p-13, AL2p-14, | | |
| AL2p-15, AL2p-16, | | |
| AL2p-17, AL2p-18, | | |
| AL2p-19, AL2p-20, | | |
| AL2p-21, AL2p-22, | | |
| AL2p-23, AL2p-24, | | |
| AL2p-25, AL2p-26, | | |
| AL2p-27, AL2p-28, | | |
| AL2p-29, AL2p-30, | | |
| AL2p-31, AL2p-32, | | |
| AL2p-33, AL2p-38, | | |
| AL2p-39, AL2p-40, | | |
| AL2p-41, AL2p-42, | | |
| AL2p-h77, AL2p-35, | RVTITADTSASTAYMELSSLRSEDTAVYYC | 1722 |
| AL2p-36, AL2p-37- | | |
| AL2p-58, and AL2p- | | |

TABLE 10D
Heavy chain framework 4 sequences of anti-TREM2 antibodies

| Ab | VH FR4 | SEQ ID NO: |
|---|---|---|
| AL2p-h50, AL2p-2, AL2p-3, AL2p-4, | WGQGTLVTVSS | 1723 |
| AL2p-5, AL2p-6, AL2p-7, AL2p-8, AL2p- | | |
| 9, AL2p-10, AL2p-11, AL2p-12, AL2p- | | |
| 13, AL2p-14, AL2p-15, AL2p-16, AL2p- | | |
| 17, AL2p-18, AL2p-19, AL2p-20, AL2p- | | |
| 21, AL2p-22, AL2p-23, AL2p-24, AL2p- | | |
| 25, AL2p-26, AL2p-27, AL2p-28, AL2p- | | |
| 29, AL2p-30, AL2p-31, AL2p-32, AL2p- | | |
| 33, AL2p-h77, AL2p-35, AL2p-36, AL2p- | | |
| 37, AL2p-38, AL2p-39, AL2p- 40, AL2p- | | |
| 41, AL2p-42, AL2p-43, AL2p-44, AL2p- | | |
| 45, AL2p-46, AL2p-47, AL2p-48, AL2p- | | |
| 49, AL2p-50, AL2p-51, AL2p-52, AL2p- | | |
| 53, AL2p-54, AL2p-55, AL2p-56, AL2p- | | |
| 57, AL2p-58, AL2p-59, AL2p-60. AL2p- | | |
| 61, and AL2p-62 | | |

TABLE 11A
Light chain framework 1 sequences of anti-TREM2 antibodies

| Ab | VL FR1 | SEQ ID NO: |
|---|---|---|
| AL2p-h50, AL2p-2, AL2p-3, | DVVMTQTPLSLSVTPGQPASISC | 1724 |
| AL2p-4, AL2p-5, AL2p-6, | | |
| AL2p-11, AL2p-17, AL2p-19, | | |
| AL2p-45, AL2p-46, AL2p-47, | | |
| AL2p-48, AL2p-49, AL2p-50, | | |
| AL2p-51, AL2p-52, AL2p-53, | | |
| AL2p-54, AL2p-55, AL2p-56, | | |
| and AL2p-57 | | |
| AL2p-7, AL2p-8, AL2p-9, | GVVMTQTPLSLSVTPGQPASISC | 1725 |
| AL2p-10, AL2p-12, AL2p- | | |
| 13, AL2p-14, AL2p-15, | | |
| AL2p-16, AL2p-18, AL2p- | | |
| 20, AL2p-21, AL2p-22, | | |
| AL2p-23, AL2p-24, AL2p- | | |
| 25, AL2p-26, AL2p-27, | | |
| AL2p-28, AL2p-29, AL2p- | | |
| 30, AL2p-31, AL2p-32, | | |
| AL2p-38, AL2p-39, AL2p- | | |
| 40, AL2p-41, AL2p-42, | | |
| AL2p-43, AL2p-44, AL2p- | | |
| 59, AL2p-60, and AL2p-61 | | |
| AL2p-33 | GVVMAQTPLSLSVTPGQPASISC | 1726 |
| AL2p-h77, AL2p-35, | DVVMTQSPDSLAVSLGERATINC | 1727 |
| AL2p-36, AL2p-37, AL2p- | | |
| 58, and AL2p-62 | | |

TABLE 11B
Light chain framework 2 sequences of anti-TREM2 antibodies

| Ab | VL FR2 | SEQ ID NO: |
|---|---|---|
| AL2p-h50, AL2p-2, AL2p-3, AL2p-4, | WY LQKPGQSPQLLIY | 1728 |
| AL2p-6, AL2p-7, AL2p-8, AL2p-9, | | |
| AL2p-11, AL2p-12, AL2p-13, AL2p- | | |
| AI 2p-16, AL2p-17, AL2p-18, AL2p- | | |
| AL2p-21, AL2p-22, AL2p-23, AL2p- | | |
| AL2p-26, AL2p-27, AL2p-28, AL2p- | | |
| 29, AL2p-30, AL2p-31, AL2p-32, | | |
| AL2p-40, AL2p-41, AL2p-42, AL2p- | | |
| AL2p-45, AL2p-46, AL2p-47, AL2p- | | |
| AL2p-50, AL2p-51, AL2p-52, AL2p- | | |
| AL2p-55, AL2p-56, AL2p-57, AL2p- | | |
| 59, AL2p-60, and AL2p-61 | | |
| AL2p-h77, AL2p-35, AL2p-36, AL2p- | WYQQKPGQSPKLLIY | 1729 |
| 37, AL2p-58, and AL2p-62 | | |

TABLE 11C
Light chain framework 3 sequences of anti-TREM2 antibodies

| Ab | VL FR3 | SEQ ID NO: |
|---|---|---|
| AL2p-h50, AL2p-2, AL2p-3, | GVPDRFSGSGSGTDFTLKISRVEAE | 1730 |
| AL2p-4, AL2p-5, AL2p-6, | DVGVYYC | |
| AL2p-7, AL2p-8, AL2p-9, | | |
| AL2p-10, AL2p-11. AL2p- | | |
| 12, AL2p-13, AL2p-14, | | |
| AL2p-15, AL2p-16, AL2p- | | |
| 17, AL2p-18, AL2p-19, | | |
| AL2p-20, AL2p-21, AL2p- | | |
| 22, AL2p-23, AL2p-24, | | |
| AL2p-25, AL2p-26, AL2p- | | |
| 27, AL2p-28, AL2p-29, | | |
| AL2p-30, AL2p-31, AL2p- | | |
| 32, AL2p-33, AL2p-38, | | |
| AL2p-39, AL2p-40, AL2p- | | |
| 41, AL2p-42, AL2p-43, | | |
| AL2p-44, AL2p-45, AL2p- | | |
| 46, AL2p-47, AL2p-48, | | |
| AL2p-49, AL2p-50, AL2p- | | |
| 51. AL2p-52, AL2p-53, | | |
| AL2p-54, AL2p-55, AL2p- | | |
| 56, AL2p-57, AL2p-58, | | |
| AL2p-59, AL2p-60, and | | |
| AL2p-61 | | |
| AL2p-h77, AL2p-35, AL2p- | GVPDRFSGSGSGTDFTLTISSLQAE | 1731 |
| 36, AL2p-37, and AL2-67 | DVAVYYC | |

TABLE 11D
Light chain framework 4 sequences of
anti-TREM2 antibodies

| | | SEQ |
|---|---|---|
| | | ID |
| Ab | VL FR4 | NO: |
| AL2p-h50, AL2p-2, AL2p-3, | FGQGTKLEIK | 1732 |
| AL2p-4, AL2p-5. AI 2p-6. | | |
| AL2p-7, AL2p-8, AL2p-9, | | |
| AL2p-10, AL2p-11, AL2p-12, | | |
| AL2p-13, AL2p-14, AL2p-15, | | |
| AL2p-16, AL2p-17, AL2p-18, | | |
| AL2p-19, AL2p-20, AL2p-21, | | |
| AL2p-22, AL2p-23, AL2p-24, | | |
| AL2p-25, AL2p-26, AL2p-27, | | |
| AL2p-28, AL2p-29, AL2p-30, | | |
| AL2p-31, AL2p-32, AL2p-33, | | |
| AL2p-38, AL2p-39, AL2p-40, | | |
| AL2p-41, AL2p-42, AL2p-43, | | |
| AL2p-44, AL2p-45, AL2p-46, | | |
| AL2p-47, AL2p-48, AL2p-49, | | |
| AL2p-50, AL2p-51, AL2p-52, | | |
| AL2p-53, AL2p-54, AL2p-55, | | |
| AL2p-56, AL2p-57, AL2p-58, | | |
| AL2p-59, AL2p-60, and AL2p-61 | | |
| AL2p-h77. AL2p-35, AL2p-36, | FGGGTKVEIK | 1733 |
| AL2p-37, and AL2p-62 | | |

TABLE 12A
Heavy chain variable region sequences of
anti-TREM2 antibodies

| | | SEQ |
|---|---|---|
| | | ID |
| Ab | HCVR | NO: |
| AL2p-h50. | QVQLVQSGAEVKKPGSSVKVSCKASGYAFSSSWMNW | 1734 |
| AL2p-5, | VRQAPGQGLEWMGRIYPGDGDTNYAQKFQGRVTITA | |
| and | DESTSTAYMELSSLRSEDTAVYYCARLLRNQPGESY | |
| AL2p-6 | AMDYWGQGTLVTVSS | |
| AL2p-2 | QVQLVQSGAEVKKPGSSVKVSCKASGYAFSSSWMNW | 1735 |
| | VRQAPGQGLEWMGRIYPGGGDTNYAQKFQGRVTITA | |
| | DESTSTAYMELSSLRSEDTAVYYCARLLRNQPGESY | |
| | AMDYWGQGTLVTVSS | |
| AL2p-3 | QVQLVQSGAEVKKPGSSVKVSCKASGYAFSSSWM | 1736 |
| | NWVRQAPGQGLEWMGRIYPGEGDTNYAQKFQGR | |
| | VTITADESTSTAYMELSSLRSEDTAVYYCARLLRNQ | |
| | PGESYAMDYWGQGTLVTVSS | |
| AL2p-4 | QVQLVQSGAEVKKPGSSVKVSCKASGYAFSSSWMNW | 1737 |
| | VRQAPGQGLEWMGRIYPGQGDTNYAQKFQGRVTITA | |
| | DESTSTAYMELSSLRSEDTAVYYCARLLRNQPGESY | |
| | AMDYWGQGTLVTVSS | |
| AL2p-7 | QVQLVQSGAEVKKPGSSVKVSCKASGYAFSLSWMNW | 1738 |
| | VRQAPGQGLEWMGRIYPGDGDTNYAQKFRGRVTITA | |
| | DESTSTAYMELSSLRSEDTAVYYCARLLRNQPGESY | |
| | AMDYWGQGTLVTVSS | |
| AL2p-8 | QVQLVQSGAEVKKPGSSVKVSCKASGYAFSLSWMNW | 1739 |
| | VRQAPGQGLEWMGRIYPGDGDTNYARKFQGRVTITA | |
| | DESTSTAYMELSSLRSEDTAVYYCARLLRNQPGSSY | |
| | AMDYWGQGTLVTVSS | |
| AL2p-9 | QVQLVQSGAEVKKPGSSVKVSCKASGYAFSRSWMNW | 1740 |
| | VRQAPGQGLEWMGRIYPGDGDTNYAQKFQGRVTITA | |
| | DESTSTAYMELSSLRSEDTAVYYCARLLRNQPGASY | |
| | AMDYWGQGTLVTVSS | |
| AL2p-10 | QVQLVQSGAEVKKPGSSVKVSCKASGYAFSSDWMNW | 1741 |
| | VRQAPGQGLEWMGRIYPGDGDTNYAQKFQGRVTITA | |
| | DESTSTAYMELSSLRSEDTAVYYCARLLRNQPGESY | |
| | AMDYWGQGTLVTVSS | |
| AL2p-11 | QVQLVQSGAEVKKPGSSVKVSCKASGYAFSSDWMNW | 1742 |
| | VRQAPGQGLEWMGRIYPGDGDTNYARKFQGRVTITA | |
| | DESTSTAYMELSSLRSEDTAVYYCARLLRNQPGESY | |
| | AMDYWGQGTLVTVSS | |
| AL2p-12 | QVQLVQSGAEVKKPGSSVKVSCKASGYAFSSHWMNW | 1743 |
| | VRQAPGQGLEWMGRIYPGDGDTNYAHKFQGRVTITA | |
| | DESTSTAYMELSSLRSEDTAVYYCARLLRNQPGESY | |
| | AMDYWGQGTLVTVSS | |
| AL2p-13 | QVQLVQSGAEVKKPGSSVKVSCKASGYAFSSHWMNW | 1744 |
| | VRQAPGQGLEWMGRIYPGDGDTNYAQKFKGRVTITA | |
| | DESTSTAYMELSSLRSEDTAVYYCARLLRNQPGESY | |
| | AMDYWGQGTLVTVSS | |
| AL2p-14 | QVQLVQSGAEVKKPGSSVKVSCKASGYAFSSHWMNW | 1745 |
| and | VRQAPGQGLEWMGRIYPGDGDTNYAQKFQGRVTITA | |
| AL2p-15 | DESTSTAYMELSSLRSEDTAVYYCARLLRNQPGESY | |
| | AMDYWGQGTLVTVSS | |
| AL2p-I6 | QVQLVQSGAEVKKPGSSVKVSCKASGYAFSSHWMNW | 1746 |
| | VRQAPGQGLEWMGRIYPGDGDTNYAQKFRGRVTITA | |
| | DESTSTAYMELSSLRSEDTAVYYCARLLRNQPGASY | |
| | AMDYWGQGTLVTVSS | |
| AL2p-17 | QVQLVQSGAEVKKPGSSVKVSCKASGYAFSSHWMNW | 1747 |
| | VRQAPGQGLEWMGRIYPGDGDTNYAQKRQGRVTITA | |
| | DESTSTAYMELSSLRSEDTAVYYCARLLRNQPGESY | |
| | AMDYWGQGTLVTVSS | |
| AL2p-18 | QVQLVQSGAEVKKPGSSVKVSCKASGYAFSSHWMNW | 1748 |
| | VRQAPGQGLEWMGRIYPGDGDTNYAQKWQGRVTITA | |
| | DESTSTAYMELSSLRSEDTAVYYCARLLRNQPGSSY | |
| | AMDYWGQGTLVTVSS | |
| AL2p-19 | QVQLVQSGAEVKKPGSSVKVSCKASGYAFSSHWMNW | 1749 |
| and | VRQAPGQGLEWMGRIYPGDGDTNYARKFQGRVTITA | |
| AL2p-20 | DESTSTAYMELSSLRSEDTAVYYCARLLRNQPGESY | |
| | AMDYWGQGTLVTVSS | |
| AL2p-21 | QVQLVQSGAEVKKPGSSVKVSCKASGYAFSSHW | 1750 |
| | MNWVRQAPGQGLEWMGRIYPGDGDTNYAWKFQ | |
| | GRVTITADESTSTAYMELSSLRSEDTAVYYCARLL | |
| | RNQPGESYAMDYWGQGTLVTVSS | |
| AL2p-22 | QVQLVQSGAEVKKPGSSVKVSCKASGYAFSSHW | 1751 |
| | MNWVRQAPGQGLEWMGRIYPGDGDTNYAYKFQ | |
| | GRVTITADESTSTAYMELSSLRSEDTAVYYCARLL | |
| | RNQPGESYAMDYWGQGTLVTVSS | |
| AL2p-23 | QVQLVQSGAEVKKPGSSVKVSCKASGYAFSSHWMNW | 1752 |
| | VRQAPGQGLEWMGRIYPGDGQTNYAQKRQGRVTITA | |
| | DESTSTAYMELSSLRSEDTAVYYCARLLRNQPGESY | |
| | AMDYWGQGTLVTVSS | |
| AL2p-24 | QVQLVQSGAEVKKPGSSVKVSCKASGYAFSSHW | 1753 |
| | MNWVRQAPGQGLEWMGRIYPGGGDTNYAQKFQ | |
| | GRVTITADESTSTAYMELSSLRSEDTAVYYCARLL | |
| | RNQPGESYAMDYWGQGTLVTVSS | |
| AL2p-25 | QVQLVQSGAEVKKPGSSVKVSCKASGYAFSSHW | 1754 |
| | MNWVRQAPGQGLEWMGRIYPGGGDTNYAQKFR | |
| | GRVTITADESTSTAYMELSSLRSEDTAVYYCARLL | |
| | RNQPGESYAMDYWGQGTLVTVSS | |
| AL2p-26 | QVQLVQSGAEVKKPGSSVKVSCKASGYAFSSHW | 1755 |
| | MNWVRQAPGQGLEWMGRIYPGGGDTNYAQKRQ | |
| | GRVTITADESTSTAYMELSSLRSEDTAVYYCARLL | |
| | RNQPGESYAMDYWGQGTLVTVSS | |
| AL2p-27 | QVQLVQSGAEVKKPGSSVKVSCKASGYAFSSHW | 1756 |
| | MNWVRQAPGQGLEWMGRIYPGQGDTNYAQKFQ | |
| | GRVTITADESTSTAYMELSSLRSEDTAVYYCARLL | |
| | RNQPGESYAMDYWGQGTLVTVSS | |
| AL2p-28 | QVQLVQSGAEVKKPGSSVKVSCKASGYAFSSHWMNW | 1757 |
| | VRQAPGQGLEWMGRIYPGVGDTNYAQKFQGRVTITA | |
| | DESTSTAYMELSSLRSEDTAVYYCARLLRNQPGESY | |
| | AMDYWGQGTLVTVSS | |
| AL2p-29 | QVQLVQSGAEVKKPGSSVKVSCKASGYAFSSQW | 1758 |
| | MNWVRQAPGQGLEWMGRIYPGDGDTNYAQKFQ | |
| | GRVTITADESTSTAYMELSSLRSEDTAVYYCARLL | |
| | RNQPGESYAMDYWGQGTLVTVSS | |
| AL2p-30 | QVQLVQSGAEVKKPGSSVKVSCKASGYAFSSQW | 1759 |
| | MNWVRQAPGQGLEWMGRIYPGDGDTNYAWKFQ | |
| | GRVTITADESTSTAYMELSSLRSEDTAVYYCARLL | |
| | RNQPGESYAMDYWGQGTLVTVSS | |
| AL2p-31, | QVQLVQSGAEVKKPGSSVKVSCKASGYAFSSQWMNW | 1760 |
| AL2p-60, | VRQAPGQGLEWMGRIYPGGGDTNYARKFQ | |
| and | GRVTITADESTSTAYMELSSLRSEDTAVYYCARLL | |
| AL2p-h31 | RNQPGESYAMDYWGQGTLVTVSS | |
| AL2p-32 | QVQLVQSGAEVKKPGSSVKVSCKASGYAFSSEWM | 1761 |
| | NWVRQAPGQGLEWMGRIYPGDGDTNYAQKFQGR | |
| | VTITADESTSTAYMELSSLRSEDTAVYYCARLLRN | |
| | QPGESYAMDYWGQGTLVTVSS | |
| AL2p-33 | EVQLVQSGAEVKKPGSSVKVSCKASGYAFSSSWM | 1762 |
| | NWVRQAPGQGLEWMGRIYPGDGDTNYAQKFQGR | |
| | VTITADESTSTAYMELSSLRSEDTAVYYCARLLRN | |
| | QPGESYAMDYWGQGTLVTVSS | |
| AL2p-h77, | QVQLVQSGAEVKKPGASVKVSCKASGYAFSSSWMNW | 1763 |
| AL2p-h26, | VRQAPGQRLEWIGRIYPGDGDTNYAQKFQGRVTITA | |
| and | DTSASTAYMELSSLRSEDTAVYYCARLLR | |
| AL2p-h90 | | |
| AL2p-35 | QVQLVQSGAEVKKPGASVKVSCKASGYAFWSSW | 1764 |
| | MNWVRQAPGQRLEWIGRIYPGDGDTNYAQKFQG | |
| | RVTITADTSASTAYMELSSLRSEDTAVYYCARLLRN | |
| | QPGESYAHDYWGQGTLVTVSS | |
| AL2p-36 | QVQLVQSGAEVKKPGASVKVSCKASGYAFSSSWMNW | 1765 |
| | VRQAPGQRLEWIGRIYPGDGDTNYARKFQGRVTITA | |
| | DTSASTAYMELSSLRSEDTAVYYCARLLRNQPGASY | |
| | AMDYWGQGTLVTVSS | |
| AL2p-37 | QVQLVQSGAEVKKPGASVKVSCKASGYAFSSQWMNW | 1766 |
| and | VRQAPGQRLEWIGRIYPGGGDTNYAGKFQGRVTITA | |
| AL2p-58 | DTSASTAYMELSSLRSEDTAVYYCARLLRNQPGESY | |
| | AMDYWGQGTLVTVSS | |
| AL2p-38, | QVQLVQSGAEVKKPGSSVKVSCKASGYAFSSHWMNW | 1767 |
| AL2p-39, | VRQAPGQGLEWMGRIYPGGGDTNYAQKFRGRVTITA | |
| and | DESTSTAYMELSSLRSEDTAVYYCARLLRNQPGASY | |
| AL2p-40 | AMDYWGQGTLVTVSS | |
| AL2p-41 | QVQLVQSGAEVKKPGSSVKVSCKASGYAFSSHWMNW | 1768 |
| and | VRQAPGQGLEWMGRIYPGEGDTNYAQKFRGRVTITA | |
| AL2p-42 | DESTSTAYMELSSLRSEDTAVYYCARLLRNQPGASY | |
| | AMDYWGQGTLVTVSS | |
| AL2p-43 | QVQLVQSGAEVKKPGSSVKVSCKASGYAFSSHWMNW | 1769 |
| and | VRQAPGQGLEWMGRIYPGGGDTNYARKFRGRVTITA | |
| AL2p-44 | DESTSTAYMELSSLRSEDTAVYYCARLLRNQPGASY | |
| | AMDYWGQGTLVTVSS | |
| AL2p-45 | QVQLVQSGAEVKKPGSSVKVSCKASGYAFSSDWMNW | 1770 |
| and | VRQAPGQGLEWMGRIYPGEGDTNYARKFQGRVTITA | |
| AL2p-46 | DESTSTAYMELSSLRSEDTAVYYCARLLRNKPGESY | |
| | AMDYWGQGTLVTVSS | |
| AL2p-47 | QVQLVQSGAEVKKPGSSVKVSCKASGYAFSSDWMNW | 1771 |
| and | VRQAPGQGLEWMGRIYPGEGDTNYARKFHGRVTITA | |
| AL2p-48 | DESTSTAYMELSSLRSEDTAVYYCARLLRNKPGESY | |
| | AMDYWGQGTLVTVSS | |
| AL2p-49 | EVQLVQSGAEVKKPGSSVKVSCKASGYAFSSDWMNW | 1772 |
| | VRQAPGQGLEWMGRIYPGEGDTNYARKFHGRVTITA | |
| | DESTSTAYMELSSLRSEDTAVYYCARLLRNKPGESY | |
| | AMDYWGQGTLVTVSS | |
| AL2p-50 | QVQLVQSGAEVKKPGSSVKVSCKASGYAFSSHWMNW | 1773 |
| and | VRQAPGQGLEWMGRIYPGEGDTNYAQKFHGRVTITA | |
| AL2p-51 | DESTSTAYMELSSLRSEDTAVYYCARLLRNQPGESY | |
| | AMDYWGQGTLVIVSS | |
| AL2p-52 | EVQLVQSGAEVKKPGSSVKVSCKASGYAFSSHWMNW | 1774 |
| and | VRQAPGQGLEWMGRIYPGEGDTNYAQKFHGRVTITA | |
| AL2p-53 | DESTSTAYMELSSLRSEDTAVYYCARLLRNQPGESY | |
| | AMDYWGQGTLVTVSS | |
| AL2p-54 | QVQLVQSGAEVKKPGSSVKVSCKASGYAFSSHWMNW | 1775 |
| | VRQAPGQGLEWMGRIYPGEGDTNYAQKFHGRVTITA | |
| | DESTSTAYMELSSLRSEDTAVYYCARLLRNKPGESY | |
| | AMDYWGQGTLVTVSS | |
| AL2p-55, | EVQLVQSGAEVKKPGSSVKVSCKASGYAFSSHWMNW | 1776 |
| AL2p-56, | VRQAPGQGLEWMGRIYPGEGDTNYAQKFHGRVTITA | |
| and | DESTSTAYMELSSLRSEDTAVYYCARLLRNKPGESY | |
| AL2p-57 | AMDYWGQGTLVTVSS | |
| AL2p-61 | QVQLVQSGAEVKKPGSSVKVSCKASGYAFSSQWMNW | 1777 |
| | VRQAPGQGLEWMGRIYPGEGDTNYARKFQGRVTITA | |
| | DESTSTAYMELSSLRSEDTAVYYCARLLRNQPGESY | |
| | AMDYWGQGTLVTVSS | |
| AL2p-62 | QVQLVQSGAEVKKPGASVKVSCKASGYAFSSQWMNW | 1778 |
| | VRQAPGQRLEWIGRIYPGEGDTNYAGKFQGRVTITA | |
| | DTSASTAYMELSSLRSEDTAVYYCARLLRNQPGESY | |
| | AMDYWGQGTLVTVSS | |
| AL2p-h19 | QVQLVQSGAEVKKPGSSVKVSCKASGYAFSSSWMNW | 1779 |
| and | VRQAPGQGLEWMGRIYPGDGDTNYAQKFQGRATITA | |
| AL2p-h35 | DTSTSTAYMELSSLRSEDTAVYYCARLLRNQPGESY | |
| | AMDYWGQGTLVTVSS | |
| AL2p-h21 | QVQLVQSGAEVKKPGASVKVSCKASGYAFSSSWMNW | 1780 |
| | VRQAPGQGLEWMGRIYPGDGDTNYAQKFQGRVTMTR | |
| | DTSTSTVYMELSSLRSEDTAVYYCARLLRNQPGESY | |
| | AMDYWGQGTLVTVSS | |
| AL2p-h22 | QVQLVQSGAEVKKPGASVKVSCKASGYAFSSSWMNW | 1781 |
| | VRQAPGQGLEWIGRIYPGDGDTNYAQKFQGRVTMTA | |
| | DTSTSTVYMELSSLRSEDTAVYYCARLLRNQPGESY | |
| | AMDYWGQGTLVTVSS | |
| AL2p-h23 | QVQLVQSGAEVKKPGASLKISCKASGYAFSSSWMNW | 1782 |
| | VRQAPGQGLEWIGRIYPGDGDINYAQKFQGRATLTA | |
| | DTSTSTAYMELSSLRSEDTAVYYCARLLRNQPGESY | |
| | AMDYWGQGALVTVSS | |
| AL2p-h24 | QVQLVQSGAEVVKPGASLKISCKASGYAFSSSWMNW | 1783 |
| | VRQAPGQGLEWIGRIYPGDGDINYNQKFQGRATLTA | |
| | DTSTSTAYMELSSLRSEDTAVYFCARLLRNQPGESY | |
| | AMDYWGQGALVTVSS | |
| AL2p-h25 | QVQLVQSGAEVKKPGASLKISCKASGYAFSSSWMNW | 1784 |
| | VRQAPGQGLEWIGRIYPGDGDINYNGEFRVRATLTA | |
| | DTSTSTAYMELSSLRSEDTAVYYCARLLRNQPGESY | |
| | AMDYWGQGALVTVSS | |
| AL2p-h27 | QVQLVQSGAEVKKPGASVKVSCKASGYAFSSSWMNW | 1785 |
| | VRQAPGQGLEWIGRIYPGDGDINYNGEFRVRATLTA | |
| | DTSTSTAYMELSSLRSEDTAVYFCARLLRNQPGESY | |
| | AMDYWGQGTLVTVSS | |
| AL2p-h28 | QVQLVQSGAEVKKPGASVKVSCKASGYAFSSSWMNW | 1786 |
| | VRQAPGQGLEWIGRIYPGDGDINYAQKFQGRATLTA | |
| | DTSTSTAYMELSSLRSEDTAVYFCARLLRNQPGESY | |
| | AMDYWGQGTLVTVSS | |
| AL2p-h29 | QVQLVQSGAEVKKPGASVKVSCKASGYAFSSSWMNW | 1787 |
| | VRQAPGQGLEWIGRIYPGDGDTNYAQKFQGRATMTA | |
| | DTSTSTAYMELSSLRSEDTAVYYCARLLRNQPGESY | |
| | AMDYWGQGTLVTVSS | |
| AL2p-h30 | QVQLVQSGAEVKKPGASVKVSCKASGYAFSSSWMNW | 1788 |
| | VRQAPGQGLEWMGRIYPGDGDTNYAQKFQGRVTMTA | |
| | DTSTSTAYMELSSLRSEDTAVYYCARLLRNQPGESY | |
| | AMDYWGQGTLVTVSS | |
| AL2p-h32 | QVQLVQSGAEVKKPGSSVKVSCKASGYAFSSSWMNW | 1789 |
| | VRQAPGQGLEWIGRIYPGDGDTNYNGEFRVRATLTA | |
| | DTSTTTAYMELSSLRSEDTAVYFCARLLRNQPGESY | |
| | AMDYWGQGTLVTVSS | |
| AL2p-h33 | QVQLVQSGAEVKKPGSSVKVSCKASGYAFSSSWMNW | 1790 |
| | VRQAPGQGLEWIGRIYPGDGDTNYAQKFQGRATLTA | |
| | DTSTTTAYMELSSLRSEDTAVYFCARLLRNQPGESY | |
| | AMDYWGQGTLVTVSS | |
| AL2p-h34 | QVQLVQSGAEVKKPGSSVKVSCKASGYAFSSSWMNW | 1791 |
| | VRQAPGQGLEWIGRIYPGDGDTNYAQKFQGRATITA | |
| | DTSTSTAYMELSSLRSEDTAVYFCARLLRNQPGESY | |
| | AMDYWGQGTLVTVSS | |
| AL2p-b36 | EVQLLESGGGLVQPGGSLRLSCAASGYAFSSSWMNW | 1792 |
| | VRQAPGKGLEWIGRIYPGDGDTNYAQKFQGRATISA | |
| | DTSKNTAYLQMNSLRAEDTAVYYCARLLRNQPGESY | |
| | AMDYWGQGTLVTVSS | |
| AL2p-h42 | QVQLVQSGAEVKKPGASVKVSCKASGYAFSSSWMNW | 1793 |
| and | VRQAPGQRLEWMGRIYPGDGDTNYAQKFQGRVTITR | |
| AL2p-h59 | DTSASTAYMELSSLRSEDTAVYYCARLLRNQPGESY | |
| | AMDYWGQGTLVTVSS | |
| AL2p-h43 | QVQLVQSGAEVKKPGASLKVSCKASGYAFSSSWMNW | 1794 |
| | VRQAPGQRLEWIGRIYPGDGDTNYNGEFRVRATLTA | |
| | DTSASTAYMELSSLRSEDTAVYFCARLLRNQPGESY | |
| | AMDYWGQGTLVTVSS | |
| AL2p-h44 | QVQLVQSGAEVKKPGASLKVSCKASGYAFSSSWMNW | 1795 |
| | VRQAPGQRLEWIGRIYPGDGDTNYAQKFQGRATLTA | |
| | DTSASTAYMELSSLRSEDTAVYFCARLLRNQPGESY | |
| | AMDYWGQGTLVTVSS | |
| AL2p-h47 | QVQLVQSGAEVKKPGASVKVSCKASGYAFSSSWMNW | 1796 |
| | VRQAPGQGLEWMGRIYPGDGDTNYNGEFRVRVTMTR | |
| | DTSTSTVYMELSSLRSEDTAVYYCARLLRNQPGESY | |
| | AMDYWGQGTLVTVSS | |
| AL2p-h76 | QVQLVQSGAEVKKPGASVKVSCKASGYAFSSSWMNW | 1797 |
| | VRQAPGQRLEWIGRIYPGDGDTNYAQKFQGRATITA | |
| | DTSASTAYMELSSLRSEDTAVYFCARLLRNQPGESY | |
| | AMDYWGQGTLVTVSS | |
| AL2p-59 | QVQLVQSGAEVKKPGSSVKVSCKASGYAFSSHWMNW | 1798 |
| | VRQAPGQGLEWMGRIYPGEGQTNYAQKRQGRVTITA | |
| | DESTSTAYMELSSLRSEDTAVYYCARLLRNQPGESY | |
| | AMDYWGQGTLVTVSS | |

TABLE 12B
Heavy chain sequences of anti-TREM2 antibodies

| | | SEQ |
|---|---|---|
| | | ID |
| Ab | HC | NO: |
| AL2p-58 | QVQLVQSGAEVKKPGASVKVSCKASGYAFSSQWMNWV | 1905 |
| huIgG1 | RQAPGQRLEWIGRIYPGGGDTNYAGKFQGRVTITADT | |
| | SASTAYMELSSLRSEDTAVYYCARLLRNQPGESYAMD | |
| | YWGQGTLVTVSSASTKGPSVFPLAPSSKSTSGGTAAL | |
| | GCLVKDYFPEPVTVSWNSGALTSGVHTFPAVLQSSGL | |
| | YSLSSVVTVPSSSLGTQTYICNVNHKPSNTKVDKKVE | |
| | PKSCDKTHTCPPCPAPELLGGPSVFLFPPKPKDTLMI | |
| | SRTPEVTCVVVDVSHEDPEVKFNWYVDGVEVHNAKTK | |
| | PREEQYNSTYRVVSVLTVLHQDWLNGKEYKCKVSNKA | |
| | LPAPIEKTISKAKGQPREPQVYTLPPSRDELTKNQVS | |
| | LTCLVKGFYPSDIAVEWESNGQPENNYKTTPPVLDSD | |
| | GSFFLYSKLTVDKSRWQQGNVFSCSVMHEALHNHYTQ | |
| | KSLSLSPGK | |
| AL2p-58 | QVQLVQSGAEVKKPGASVKVSCKASGYAFSSQWMNWV | 1906 |
| huIgG1 | RQAPGQRLEWIGRIYPGGGDTNYAGKFQGRVTITADT | |
| | SASTAYMELSSLRSEDTAVYYCARLLRNQPGESYAMD | |
| | YWGQGTLVTVSSASTKGPSVFPLAPSSKSTSGGTAAL | |
| | GCLVKDYFPEPVTVSWNSGALTSGVHTFPAVLQSSGL | |
| | YSLSSVVTVPSSSLGTQTYICNVNHKPSNTKVDKKVE | |
| | PKSCDKTHTCPPCPAPELLGGPSVFLFPPKPKDTLMI | |
| | SRTPEVTCVVVDVSHEDPEVKFNWYVDGVEVHNAKTK | |
| | PREEQYNSTYRVVSVLTVLHQDWLNGKEYKCKVSNKA | |
| | LPAPIEKTISKAKGQPREPQVYTLPPSRDELTKNQVS | |
| | LTCLVKGFYPSDIAVEWESNGQPENNYKTTPPVLDSD | |
| | GSFFLYSKLTVDKSRWQQGNVFSCSVMHEALHNHYTQ | |
| | KSLSLSPG | |
| AL2p-58 | QVQLVQSGAEVKKPGASVKVSCKASGYAFSSQWMNWV | 1907 |
| huIgG1 | RQAPGQRLEWIGRIYPGGGDTNYAGKFQGRVTITADT | |
| PSEG | SASTAYMELSSLRSEDTAVYYCARLLRNQPGESYAMD | |
| | YWGQGTLVTVSSASTKGPSVFPLAPSSKSTSGGTAAL | |
| | GCLVKDYFPEPVTVSWNSGALTSGVHTFPAVLQSSGL | |
| | YSLSSVVTVPSSSLGTQTYICNVNHKPSNTKVDKKVE | |
| | PKSCDKTHTCPPCPAPELLGGPSVFLFPPKPKDTLMI | |
| | SRTPEVTCVVVDVSHEDPEVKFNWYVDGVEVHNAKTK | |
| | PREEQYNSTYRVVSVLTVLHQDWLNGKEYKCKVSNKA | |
| | LPASIEKTISKAKGQPREPQVYTLPPSRDELTKNQVS | |
| | LTCLVKGFYPSDIAVEWESNGQPENNYKTTPPVLDSD | |
| | GSFFLYSKLTVDKSRWQQGNVFSCSVMHGALHNHYTQ | |
| | KSLSLSPGK | |
| AL2p-58 | QVQLVQSGAEVKKPGASVKVSCKASGYAFSSQWMNWV | 1908 |
| huIgG1 | RQAPGQRLEWIGRIYPGGGDTNYAGKFQGRVTITADT | |
| PSEG | SASTAYMELSSLRSEDTAVYYCARLLRNQPGESYAMD | |
| | YWGQGTLVTVSSASTKGPSVFPLAPSSKSTSGGTAAL | |
| | GCLVKDYFPEPVTVSWNSGALTSGVHTFPAVLQSSGL | |
| | YSLSSVVTVPSSSLGTQTYICNVNHKPSNTKVDKKVE | |
| | PKSCDKTHTCPPCPAPELLGGPSVFLFPPKPKDTLMI | |
| | SRTPEVTCVVVDVSHEDPEVKFNWYVDGVEVHNAKTK | |
| | PREEQYNSTYRVVSVLTVLHQDWLNGKEYKCKVSNKA | |
| | LPASIEKTISKAKGQPREPQVYTLPPSRDELTKNQVS | |
| | LTCLVKGFYPSDIAVEWESNGQPENNYKTTPPVLDSD | |
| | GSFFLYSKLTVDKSRWQQGNVFSCSVMHGALHNHYTQ | |
| | KSLSLSPG | |
| AL2p-47 | QVQLVQSGAEVKKPGSSVKVSCKASGYAFSSDWMNWV | |
| huIgG1 | RQAPGQGLEWMGRIYPGEGDTNYARKFHGRVTITADE | 1909 |
| | STSTAYMELSSLRSEDTAVYYCARLLRNKPGESYAMD | |
| | YWGQGTLVTVSSASTKGPSVFPLAPSSKSTSGGTAAL | |
| | GCLVKDYFPEPVTVSWNSGALTSGVHTFPAVLQSSGL | |
| | YSLSSVVTVPSSSLGTQTYICNVNHKPSNTKVDKKVE | |
| | PKSCDKTHTCPPCPAPELLGGPSVFLFPPKPKDTLMI | |
| | SRTPEVTCVVVDVSHEDPEVKFNWYVDGVEVHNAKTK | |
| | PREEQYNSTYRVVSVLTVLHQDWLNGKEYKCKVSNKA | |
| | LPAPIEKTISKAKGQPREPQVYTLPPSRDELTKKQVS | |
| | LTCLVKGFYPSDIAVEWESNGQPENNYKTTPPVLDSD | |
| | GSFFLYSKLTVDKSRWQQGNVFSCSVMHEALHNHYTQ | |
| | KSLSLSPGK | |
| AL2p-47 | QVQLVQSGAEVKKPGSSVKVSCKASGYAFSSDWMNWV | 1910 |
| hulgG1 | RQAPGQGLEWMGRIYPGEGDTNYARKFHGRVTITADE | |
| | STSTAYMELSSLRSEDTAVYYCARLLRNKPGESYAMD | |
| | YWGQGTLVTVSSASTKGPSVFPLAPSSKSTSGGTAAL | |
| | GCLVKDYFPEPVTVSWNSGALTSGVHTFPAVLQSSGL | |
| | YSLSSVVTVPSSSLGTQTYICNVNHKPSNTKVDKKVE | |
| | PKSCDKTHTCPPCPAPELLGGPSVFLFPPKPKDTLMI | |
| | SRTPEVTCVVVDVSHEDPEVKFNWYVDGVEVHNAKTK | |
| | PREEQYNSTYRVVSVLTVLHQDWLNGKEYKCKVSNKA | |
| | LPAPIEKTISKAKGQPREPQVYTLPPSRDELTKKVS | |
| | LTCLVKGFYPSDIAVEWESNGQPENNYKTTPPVLDSD | |
| | GSFFLYSKLTVDKSRWQQGNVFSCSVMHEALHNHYTQ | |
| | KSLSLSPG | |
| AL2p-47 | QVQLVQSGAEVKKPGSSVKVSCKASGYAFSSDWMNWV | 1911 |
| huIgG1 | RQAPGQGLEWMGRIYPGEGDTNYARKFHGRVTITADE | |
| PSEG | STSTAYMELSSLRSEDTAVYYCARLLRNKPGESYAMD | |
| | YWGQGTLVTVSSASTKGPSVFPLAPSSKSTSGGTAAL | |
| | GCLVKDYFPEPVTVSWNSGALTSGVHTFPAVLQSSGL | |
| | YSLSSVVTVPSSSLGTQTYICNVNHKPSNTKVDKKVE | |
| | PKSCDKTHTCPPCPAPELLGGPSVFLFPPKPKDTLMI | |
| | SRTPEVTCVVVDVSHEDPEVKFNWYVDGVEVHNAKTK | |
| | PREEQYNSTYRVVSVLTVLHQDWLNGKEYKCKVSNKA | |
| | LPASIEKTISKAKGQPREPQVYTLPPSRDELTKNQVS | |
| | LTCLVKGFYPSDIAVEWESNGQPENNYKTTPPVLDSD | |
| | GSFFLYSKLTVDKSRWQQGNVFSCSVMHGALHNHYTQ | |
| | KSLSLSPGK | |
| AL2p-47 | QVQLVQSGAEVKKPGSSVKVSCKASGYAFSSDWMNWV | 1912 |
| huIgG1 | RQAPGQGLEWMGRIYPGEGDTNYARKFHGRVTITADE | |
| PSEG | STSTAYMELSSLRSEDTAVYYCARLLRNKPGESYAMD | |
| | YWGQGTLVTVSSASTKGPSVFPLAPSSKSTSGGTAAL | |
| | GCLVKDYFPEPVTVSWNSGALTSGVHTFPAVLQSSGL | |
| | YSLSSVVTVPSSSLGTQTYICNVNHKPSNTKVDKKVE | |
| | PKSCDKTHTCPPCPAPELLGGPSVFLFPPKPKDTLMI | |
| | SRTPEVTCVVVDVSHEDPEVKFNWYVDGVEVHNAKTK | |
| | PREEQYNSTYRVVSVLTVLHQDWLNGKEYKCKVSNKA | |
| | LPASIEKTISKAKGQPREPQVYTLPPSRDELTKNQVS | |
| | LTCLVKGFYPSDIAVEWESNGQPENNYKTTPPVLDSD | |
| | GSFFLYSKLTVDKSRWQQGNVFSCSVMHGALHNHYTQ | |
| | KSLSLSPG | |
| AL2p-61 | QVQLVQSGAEVKKPGSSVKVSCKASGYAFSSQWMNWV | 1913 |
| hulgG1 | RQAPGQGLEWMGRIYPGEGDTNYARKFQGRVTITADE | |
| | STSTAYMELSSLRSEDTAVYYCARLLRNQPGESYAMD | |
| | YWGQGTLVTVSSASTKGPSVFPLAPSSKSTSGGTAAL | |
| | GCLVKDYFPEPVTVSWNSGALTSGVHTFPAVLQSSGL | |
| | YSLSSVVTVPSSSLGTQTYICNVNHKPSNTKVDKKVE | |
| | PKSCDKTHTCPPCPAPELLGGPSVFLFPPKPKDTLMI | |
| | SRTPEVTCVVVDVSHEDPEVKFNWYVDGVEVHNAKTK | |
| | PREEQYNSTYRVVSVLTVLHQDWLNGKEYKCKVSNKA | |
| | LPAPIEKTISKAKGQPREPQVYTLPPSRDELTKNQVS | |
| | LTCLVKGFYPSDIAVEWESNGQPENNYKTTPPVLDSD | |
| | GSFFLYSKLTVDKSRWQQGNVFSCSVMHEALHNHYTQ | |
| | KSLSLSPGK | |
| AL2p-61 | QVQLVQSGAEVKKPGSSVKVSCKASGYAFSSQWMNWV | 1914 |
| huIgG1 | RQAPGQGLEWMGRIYPGEGDTNYARKFQGRVTITADE | |
| | STSTAYMELSSLRSEDTAVYYCARLLRNQPGESYAMD | |
| | YWGQGTLVIVSSASTKGPSVFPLAPSSKSTSGGTAAL | |
| | GCLVKDYFPEPVTVSWNSGALTSGVHTFPAVLQSSGL | |
| | YSLSSVVTVPSSSLGTQTYICNVNHKPSNTKVDKKVE | |
| | PKSCDKTHTCPPCPAPELLGGPSVFLFPPKPKDTLMI | |
| | SRTPEVTCVVVDVSHEDPEVKFNWYVDGVEVHNAKTK | |
| | PREEQYNSTYRVVSVLTVLHQDWLNGKEYKCKVSNKA | |
| | LPAPIEKTISKAKGQPREPQVYTLPPSRDELTKNQVS | |
| | LTCLVKGFYPSDIAVEWESNGQPENNYKTTPPVLDSD | |
| | GSFFLYSKLTVDKSRWQQGNVFSCSVMHEALHNHYTQ | |
| | KSLSI,SPG | |
| AL2p-40 | QVQLVQSGAEVKKPGSSVKVSCKASGYAFSSHWMNWV | 1915 |
| huIgG1 | RQAPGQGLEWMGRIYPGGGDTNYAQKFRGRVTITADE | |
| | STSTAYMELSSLRSEDTAVYYCARLLRNQPGASYAMD | |
| | YWGQGTLVIVSSASTKGPSVFPLAPSSKSTSGGTAAL | |
| | GCLVKDYFPEPVTVSWNSGALTSGVHTFPAVLQSSGL | |
| | YSLSSVVTVPSSSLGTQTYICNVNHKPSNTKVDKKVE | |
| | PKSCDKTHTCPPCPAPELLGGPSVFLFPPKPKDTLMI | |
| | SRTPEVTCVVVDVSHEDPEVKFNWYVDGVEVHNAKTK | |
| | PREEQYNSTYRVVSVLTVLHQDWLNGKEYKCKVSNKA | |
| | LPAPIEKTISKAKGQPREPQVYTLPPSRDELTKNQVS | |
| | LTCLVKGFYPSDIAVEWESNGQPENNYKTTPPVLDSD | |
| | GSFFLYSKLTVDKSRWQQGNVFSCSVMHEALHNHYTQ | |
| | KSLSLSPGK | |
| AL2p-40 | QVQLVQSGAEVKKPGSSVKVSCKASGYAFSSHWMNWV | 1916 |
| huIgG1 | RQAPGQGLEWMGRIYPGGGDTNYAQKFRGRVTITADE | |
| | STSTAYMELSSLRSEDTAVYYCARLLRNQPGASYAMD | |
| | YWGQGTLVIVSSASTKGPSVFPLAPSSKSTSGGTAAL | |
| | GCLVKDYFPEPVTVSWNSGALTSGVHTFPAVLQSSGL | |
| | YSLSSVVTVPSSSLGTQTYICNVNHKPSNTKVDKKVE | |
| | PKSCDKTHTCPPCPAPELLGGPSVFLFPPKPKDTLMI | |
| | SRTPEVTCVVVDVSHEDPEVKFNWYVDGVEVHNAKTK | |
| | PREEQYNSTYRVVSVLTVLHQDWLNGKEYKCKVSNKA | |
| | LPAPIEKTISKAKGQPREPQVYTLPPSRDELTKNQVS | |
| | LTCLVKGFYPSDIAVEWESNGQPENNYKTTPPVLDSD | |
| | GSFFLYSKLTVDKSRWQQGNVFSCSVMHEALHNHYTQ | |
| | KSLSLSPG | |
| AL2p-44 | QVQLVQSGAEVKKPGSSVKVSCKASGYAFSSHWMNWV | 1917 |
| huIgG1 | RQAPGQGLEWMGRIYPGGGDTNYARKFRGRVTITADE | |
| | STSTAYMELSSLRSEDTAVYYCARLLRNQPGASYAMD | |
| | YWGQGTLVTVSSASTKGPSVFPLAPSSKSTSGGTAAL | |
| | GCLVKDYFPEPVTVSWNSGALTSGVHTFPAVLQSSGL | |
| | YSLSSVVTVPSSSLGTQTYICNVNHKPSNTKVDKKVE | |
| | PKSCDKTHTCPPCPAPELLGGPSVFLFPPKPKDTLMI | |
| | SRTPEVTCVVVDVSHEDPEVKFNWYVDGVEVHNAKTK | |
| | PREEQYNSTYRVVSVLTVLHQDWLNGKEYKCKVSNKA | |
| | LPAPIEKTISKAKGQPREPQVYTLPPSRDELTKNQVS | |
| | LTCLVKGFYPSDIAVEWESNGQPENNYKTTPPVLDSD | |
| | GSFFLYSKLTVDKSRWQQGNVFSCSVMHEALHNHYTQ | |
| | KSLSLSPGK | |
| AL2p-44 | QVQLVQSGAEVKKPGSSVKVSCKASGYAFSSHWMNWV | 1918 |
| huIgG1 | RQAPGQGLEWMGRIYPGGGDTNYARKFRGRVTITADE | |
| | STSTAYMELSSLRSEDTAVYYCARLLRNQPGASYAMD | |
| | YWGQGTLVTVSSASTKGPSVFPLAPSSKSTSGGTAAL | |
| | GCLVKDYFPEPVTVSWNSGALTSGVHTFPAVLQSSGL | |
| | YSLSSVVTVPSSSLGTQTYICNVNHKPSNTKVDKKVE | |
| | PKSCDKTHTCPPCPAPELLGGPSVFLFPPKPKDTLMI | |
| | SRTPEVTCVVVDVSHEDPEVKFNWYVDGVEVHNAKTK | |
| | PREEQYNSTYRVVSVLTVLHQDWLNGKEYKCKVSNKA | |
| | LPAPIEKTISKAKGQPREPQVYTLPPSRDELTKNQVS | |
| | LTCLVKGFYPSDIAVEWESNGQPENNYKTTPPVLDSD | |
| | GSFFLYSKLTVDKSRWQQGNVFSCSVMHEALHNHYTQ | |
| | KSLSLSPG | |
| AL2p-41 | QVQLVQSGAEVKKPGSSVKVSCKASGYAFSSHWMNWV | 1919 |
| huIgG1 | RQAPGQGLEWMGRIYPGEGDTNYAQKFRGRVTITADE | |
| | STSTAYMELSSLRSEDTAVYYCARLLRNQPGASYAMD | |
| | YWGQGTLVTVSSASTKGPSVFPLAPSSKSTSGGTAAL | |
| | GCLVKDYFPEPVTVSWNSGALTSGVHTFPAVLQSSGL | |
| | YSLSSVVTVPSSSLGTQTYICNVNHKPSNTKVDKKVE | |
| | PKSCDKTHTCPPCPAPELLGGPSVFLFPPKPKDTLMI | |
| | SRTPEVTCVVVDVSHEDPEVKFNWYVDGVEVHNAKTK | |
| | PREEQYNSTYRVVSVLTVLHQDWLNGKEYKCKVSNKA | |
| | LPAPIEKTISKAKGQPREPQVYTLPPSRDELTKNQVS | |
| | LTCLVKGFYPSDIAVEWESNGQPENNYKTTPPVLDSD | |
| | GSFFLYSKLTVDKSRWQQGNVFSCSVMHEALHNHYTQ | |
| | KSLSLSPGK | |
| AL2p-41 | QVQLVQSGAEVKKPGSSVKVSCKASGYAFSSHWMNWV | 1920 |
| huIgG1 | RQAPGQGLEWMGRIYPGEGDTNYAQKFRGRVTITADE | |
| | STSTAYMELSSLRSEDTAVYYCARLLRNQPGASYAMD | |
| | YWGQGTLVTVSSASTKGPSVFPLAPSSKSTSGGTAAL | |
| | GCLVKDYFPEPVTVSWNSGALTSGVHTFPAVLQSSGL | |
| | YSLSSVVTVPSSSLGTQTYICNVNHKPSNTKVDKKVE | |
| | PKSCDKTHTCPPCPAPELLGGPSVFLFPPKPKDTLMI | |
| | SRTPEVTCVVVDVSHEDPEVKFNWYVDGVEVHNAKTK | |
| | PREEQYNSTYRVVSVLTVLHQDWLNGKEYKCKVSNKA | |
| | LPAPIEKTISKAKGQPREPQVYTLPPSRDELTKNQVS | |
| | LTCLVKGFYPSDIAVEWESNGQPENNYKTTPPVLDSD | |
| | GSFFLYSKLTVDKSRWQQGNVFSCSVMHEALHNHYTQ | |
| | KSLSLSPG | |

TABLE 13A
Light chain variable region sequences of
anti-TREM2 antibodies

| | | SEQ |
|---|---|---|
| | | ID |
| Ab | LCVR | NO: |
| AL2p-h50, | DVVMTQTPLSLSVTPGQPASISCRSSQSLVHSN | 1799 |
| AL2p-2, | GYTYLHWYLQKPGQSPQLLIYKVSNRFSGVPDR | |
| AL2p-3, | FSGSGSGTDFTLKISRVEAEDVGVYYCSQSTRV | |
| AL2p-4, | PYTFGQGTKLEIK | |
| AL2p-h42, | | |
| AL2p-h43, | | |
| AL2p-h44, | | |
| and | | |
| AL2p-h47 | | |
| AL2p-5 | DVVMTQTPLSLSVTPGQPASISCRSSQSLVHSNRY | 1800 |
| | TYLHWYLQKPGQSPQLLIYKVSNRFSGVPDRFSGS | |
| | GSGTDFTLKISRVEAEDVGVYYCSQSTRVPYTFGQ | |
| | GTKLEIK | |
| AL2p-6 | DVVMTQTPLSLSVTPGQPASISCRSSQSLVHSNWY | 1801 |
| | TYLHWYLQKPGQSPQLLIYKVSNRFSGVPDRFSGS | |
| | GSGTDFTLKISRVEAEDVGVYYCSQSTRVPYTFGQ | |
| | GTK | |
| AL2p-7, | GVVMIQTPLSLSVTPGQPASISCRSSQSLIHSNGY | |
| AL2p-8, | TYLHWYLQKPGQSPQLLIYKVSNRRSGVPDRFSGS | 1802 |
| AL2p-13, | GSGTDFTLKISRVEAEDVGVYYCSQSTRVPYTFGQ | |
| and | GTKLE1K | |
| AL2p-26 | | |
| AL2p-9, | GVVMTQTPLSLSVTPGQPASISCRTSQSLVHSNGY | 1803 |
| AL2p-16, | TYLHWYLQKPGQSPQLLIYKVSNRVSGVPDRFSGS | |
| AL2p-18, | GSGTDFTLKISRVEAEDVGVYYCSQSTRVPYTFGQ | |
| AL2p-20, | GTKLE1K | |
| AL2p-23, | | |
| AL2p-25, | | |
| and | | |
| AL2p-28 | | |
| AL2p-10, | GVVMTQTPLSLSVTPGQPASISCRSSQSLVHSNGY | 1804 |
| AL2p-12, | TYLHWYLQKPGQSPQLLIYKVSNRRSGVPDRFSGS | |
| AL2p-31, | GSGTDFTLKISRVEAEDVGVYYCSQSTRVPYTFGQ | |
| and | GTKLEK | |
| AL2p-32 | | |
| AL2p-11, | DVVMTQTPLSLSVTPGQPASISCRSSRSLVHSNGY | 1805 |
| AL2p-17, | TYLHWYLQKPGQSPQLLIYKVSNRVSGVPDRFSGS | |
| and | GSGTDFTLKISRVEAEDVGVYYCSQSTRVPYTFGQ | |
| AL2p-19 | GTKLEIK | |
| AL2p-14, | GVVMTQTPLSLSVTPGQPASISCRSSRSLVHSNGY | 1806 |
| AL2p-24, | TYLHWYLQKPGQSPQLLIYKVSNRFSGVPDRFSGS | |
| and | GSGTDFTLKISRVEAEDVGVYYCSQSTRVPYTFGQ | |
| AL2p-29 | GTKLEIK | |
| AL2p-15, | GVVMTQTPLSLSVTPGQPASISCRSSSSLVHSNGY | 1807 |
| AL2p-21, | TYLHWYLQKPGQSPQLLIYKVSNRKSGVPDRFSGS | |
| and | GSGTDFTLKISRVEAEDVGVYYCSQSTRVPYTFGQ | |
| AL2p-30 | GTKLEIK | |
| AL2p-22 | GVVMTQTPLSLSVTPGQPASISCRSSRSLVHSNGY | 1808 |
| | TYLHWYLQKPGQSPQLLIYKVSNRRSGVPDRFSGS | |
| | GSGTDFTLKISRVEAEDVGVYYCSQSTRVPYTFGQ | |
| | GTKLEIK | |
| AL2p-27 | GVVMTQTPLSLSVTPGQPASISCRSSRSLVHSNGY | 1809 |
| | TYLHWYLQKPGQSPQLLIYKVSNRVSGVPDRFSGS | |
| | GSGTDFTLKISRVEAEDVGVYYCSQSTRVPYTFGQ | |
| | GTKLEIK | |
| AL2p-33 | GVVMAQTPLSLSVIPGQPASISCRISQSLVHSNGY | 1810 |
| | TYLHWYLQKPGQSPQLLIYKVSNRVSGVPDRFSGS | |
| | GSGTDFILKISRVEAEDVGVYYCSQSTRVPYTFGQ | |
| | GTKLEIK | |
| AL2p-h77, | DVVMTQSPDSLAVSLGERATINCRSSQSLVHSNGY | 1811 |
| AL2p-35, | TYLHWYQQKPGQSPKLLIYKVSNRFSGVPDRFSGS | |
| AL2p-36, | GSGTDFTLTISSLQAEDVAVYYCSQSTRVPYTFGG | |
| AL2p-37, | GTKVEIK | |
| and | | |
| AL2p-h76 | | |
| AL2p-38 | GVVMTQTPLSLSVTPGQPASISCRSSRSLVHSNRY | 1812 |
| and | TYLHWYLQKPGQSPQLLIYKVSNRRSGVPDRFSGS | |
| AL2p-43 | GSGTDFTLKISRVEAEDVGVYYCSQSTRVPYTFGQ | |
| | GTKLEIK | |
| AL2p-39 | GVVMTQTPLSLSVTPGQPASISCRSSRSLVHSNQY | 1813 |
| and | TYLHWYLQKPGQSPQLLIYKVSNRRSGVPDRFSGS | |
| AL2p-41 | GSGTDFTLKISRVEAEDVGVYYCSQSTRVPYTFGQ | |
| | GTKLEIK | |
| AL2p-40, | GVVMTQTPLSLSVTPGQPASISCRTSRSLVHSNRY | 1814 |
| AL2p-42, | TYLHWYLQKPGQSPQLLIYKVSNRRSGVPDRFSGS | |
| and | GSGTDFTLKISRVEAEDVGVYYCSQSTRVPYTFGQ | |
| AL2p-44 | GTKLEIK | |
| AL2p-45, | DVVMTQTPLSLSVTPGQPASISCRTSQSLVHSNAY | 1815 |
| AL2p-47, | TYLHWYLQKPGQSPQLLIYKVSNRVSGVPDRFSGS | |
| AL2p-50, | GSGTDFTLKISRVEAEDVGVYYCSQSTRVPYTFGQ | |
| AL2p-52, | GTKLEIK | |
| AL2p-55, | | |
| and | | |
| AL2p-56 | | |
| AL2p-46, | DVVMTQTPLSLSVTPGQPASISCRTSQSLVHSNQY | 1816 |
| AL2p-48, | TYLHWYLQKPGQSPQLLIYKVSNRVSGVPDRFSGS | |
| AL2p-49, | GSGTDFTLKISRVEAEDVGVYYCSQSTRVPYTFGQ | |
| AL2p-51, | GTKLEIK | |
| AL2p-53, | | |
| AL2p-54, | | |
| and | | |
| AL2p-57 | | |
| AL2p-61 | GVVMTQTPLSLSVTPGQPASISCRSSQSLVHSNQY | 1817 |
| | TYLHWYLQKPGQSPQLLIYKVSNRRSGVPDRFSGS | |
| | GSGTDFTLKISRVEAEDVGVYYCSQSTRVPYTFGQ | |
| | GTKLEIK | |
| AL2p-62 | DVVMTQSPDSLAVSLGERATINCRSSQSLVHSNQY | 1818 |
| | TYLHWYQQKPGQSPKLLIYKVSNRFSGVPDRFSGS | |
| | GSGTDFTLTISSLQAEDVAVYYCSQSTRVPYTFGG | |
| | GTKVEIK | |
| AL2p-58 | DVVMTQSPDSLAVSLGERATINCRSSQSLVHSNRY | 1819 |
| | TYLHWYQQKPGQSPKLLIYKVSNRFSGVPDRFSGS | |
| | GSGTDFTLKISRVEAEDVGVYYCSQSTRVPYTFGQ | |
| | GTKLEIK | |
| AL2p-60 | GVVMTQTPLSLSVTPGQPASISCRSSQSLVHSNRY | 1820 |
| | TYLHWYLQKPGQSPQLLIYKVSNRRSGVPDRFSGS | |
| | GSGTDFTLKISRVEAEDVGVYYCSQSTRVPYTFGQ | |
| | GTKLEIK | |
| AL2p-h19 | DIVMTQTPLSLSVTPGQPASISCRSSQSLVHSNGY | 1821 |
| | TYLHWYLQKPGQSPQLLIYKVSNRFSGVPDRFSGS | |
| | GSGTDFTLKISRVEAEDVGVYYCSQSTRVPYTFGQ | |
| | GTKLEIK | |
| AL2p-h21, | DVVMTQTPLSLSVTPGQPASISCRSSQSLVHSNGY | 1822 |
| AL2p-h22, | TYLHWYLQKPGQSPQLLIYKVSNRFSGVPDRFSGS | |
| AL2p-h23, | GSGTDFTLKISRVEAEDLGVYFCSQSTRVPYTFGQ | |
| AL2p-h24, | GTKLEIK | |
| AL2p-h25, | | |
| AL2p-h26, | | |
| AL2p-h27, | | |
| AL2p-h28, | | |
| AL2p-h29, | | |
| AL2p-h30, | | |
| AL2p-h31, | | |
| AL2p-h32, | | |
| AL2p-h33, | | |
| AL2p-h34, | | |
| AL2p-h35, | | |
| AL2p-h36 | | |
| AL2p-h59 | DIVMTQSPLSLPVTPGEPASISCRSSQSLVHSNGY | 1823 |
| | TYLHWYLQKPGQSPQLLIYKVSNRFSGVPDRFSGS | |
| | GSGTDFTLKISRVEAEDVGVYYCSQSTRVPYTFGG | |
| | GTKVEIK | |
| AL2p-h90 | DVQMTQSPSSLSASVGDRVTITCRSSQSLVHSNGY | 1824 |
| | TYLHWYQQKPGKSPKLLIYKVSNRFSGVPSRFSGS | |
| | GSGTDFTLTISSLQPEDFATYYCSQSTRVPYTFGG | |
| | GTKVE1K | |
| AL2p-59 | GVVMTQTPLSLSVTPGQPASISCRTSQSLVHSNQY | 1825 |
| | TYLHWYLQKPGQSPQLLIYKVSNRVSGVPDRFSGS | |
| | GSGTDFTLKISRVEAEDVGVYYCSQSTRVPYTFGQ | |
| | GTKLEIK | |

TABLE 13B
Light chain sequences of anti-TREM2 antibodies

| | | SEQ |
|---|---|---|
| | | ID |
| Ab | LC | NO: |
| AL2p-58 | DVVMTQSPDSLAVSLGERATINCRSSQSLVHSNRYT | 1921 |
| huIgG1, | YLHWYQQKPGQSPKLLIYKVSNRFSGVPDRFSGSGS | |
| and | GTDFTLKISRVEAEDVGVYYCSQSTRVPYTFGQGTK | |
| AL2p-58 | LEIKRTVAAPSVFIFPPSDEQLKSGTASVVCLLNNF | |
| huIgG1 | YPREAKVQWKVDNALQSGNSQESVTEQDSKDSTYSL | |
| PSEG | SSTLTLSKADYEKHKVYACEVTHQGLSSPVTKSFNR | |
| | GEC | |
| AL2p-47 | DVVMTQTPLSLSVTPGQPASISCRTSQSLVHSNAYT | 1922 |
| huIgG1, | YLHWYLQKPGQSPQLLIYKVSNRVSGVPDRFSGSGS | |
| and | GTDFTLKISRVEAEDVGVYYCSQSTRVPYTFGQGTK | |
| AL2p-47 | LEIKRTVAAPSVFIFPPSDEQLKSGTASVVCLLNNF | |
| huIgG1 | YPREAKVQWKVDNALQSGNSQESVTEQDSKDSTYSL | |
| PSEG | SSTLTLSKADYEKHKVYACEVTHQGLSSPVTKSFNR | |
| | GEC | |
| AL2p-61 | GVVMTQTPLSLSVTPGQPASISCRSSQSLVHSNQYT | 1923 |
| huIgG1 | YLHWYLQKPGQSPQLLIYKVSNRRSGVPDRFSGSGS | |
| | GTDFTLKISRVEAEDVGVYYCSQSTRVPYTFGQGTK | |
| | LEIKRTVAAPSVFIFPPSDEQLKSGTASVVCLLNNF | |
| | YPREAKVQWKVDNALQSGNSQESVTEQDSKDSTYSL | |
| | SSTLTLSKADYEKHKVYACEVTHQGLSSPVTKSFNR | |
| | GEC | |
| AL2p-41 | GVVMTQTPLSLSVTPGQPASISCRSSRSLVHSNQYT | 1924 |
| huIgG1 | YLHWYLQKPGQSPQLLIYKVSNRRSGVPDRFSGSGS | |
| | GTDFTLKISRVEAEDVGVYYCSQSTRVPYTFGQGTK | |
| | LEIKRTVAAPSVFIFPPSDEQLKSGTASVVCLLNNF | |
| | YPREAKVQWKVDNALQSGNSQESVTEQDSKDSTYSL | |
| | SSTLTLSKADYEKHKVYACEVTHQGLSSPVTKSFNR | |
| | GEC | |
| AL2p-40 | GVVMTQTPLSLSVTPGQPASISCRTSRSLVHSNRYT | 1925 |
| huIgG1, | YLHWYLQKPGQSPQLLIYKVSNRRSGVPDRFSGSGS | |
| and | GTDFTLKISRVEAEDVGVYYCSQSTRVPYTFGQGTK | |
| AL2p-44 | LEIKRTVAAPSVFIFPPSDEQLKSGTASVVCLLNNF | |
| huIgG1 | YPREAKVQWKVDNALQSGNSQESVTEQDSKDSTYSL | |
| | SSTLTLSKADYEKHKVYACEVTHQGLSSPVTKSFNR | |
| | GEC | |

[0363] In some embodiments, each of the light chain variable regions and each of the heavy chain variable regions disclosed in Tables 8A-8C, 9A-9C, 10A-10D, 11A-11D, 12A, 12B, 13A and 13B as well as specific combinations thereof and other embodiments of the anti-TREM2 antibody described in the '573 application and herein may be attached to the light chain constant regions (Table 4) and heavy chain constant regions (Table 5) to form complete antibody light and heavy chains, respectively, as further discussed below. Further, each of the generated heavy and light chain sequences may be combined to form a complete antibody structure. It should be understood that the heavy chain and light chain variable regions provided herein can also be attached to other constant domains having different sequences than the exemplary sequences listed herein.

F. PCT Patent Application Publication No. WO2018/015573A1

[0364] In some embodiments, the TREM2 agonist is an antibody, or antigen binding fragment thereof, that prevents the cleavage of TREM2 as described in PCT Patent Application Publication No. WO2018/015573A1 (“the '573 application”), which is incorporated by reference herein, in its entirety.

[0365] In some embodiments, the TREM2 binding agent comprises an antibody that comprises a light chain variable domain comprising a CDRL1, CDRL2, and CDRL3, and a heavy chain variable domain comprising a CDRH1, CDRH2, and CDRH3 disclosed in the '573 application specification. In some embodiments, the TREM2 binding agent comprises an antibody that comprises a light chain variable domain and a heavy chain variable domain disclosed in the '573 application specification.

[0366] In some embodiments, the antibody is a binding molecule that inhibits (preferably prevents) TREM2 cleavage. More specifically, in the context of the present invention cleavage (i.e. shedding) of the TREM2 ectodomain is inhibited by the binding molecule of the present invention. In some embodiments, the antibody is a binding molecule that inhibits (preferably prevents) TREM2 cleavage and activates TREM2 activity. In some embodiments, the herein provided binding molecule has a binding site within the ectodomain of TREM2, preferably the stalk region of the TREM2 ectodomain.

[0367] In some embodiments, the antibody is:
[0368] (1) an antibody, wherein the heavy chain variable region comprises the sequence of SEQ ID NO: 1955 and the light chain variable region comprises the sequence of SEQ ID NO: 1965; and wherein the antibody inhibits TREM2 cleavage;
[0369] (2) an antibody, wherein the heavy chain variable region comprises a sequence having at least 85%, preferably at least 90%, more preferably at least 95%, even more preferably at least 98%, and most preferably at least 99% identity to SEQ ID NO: 1955, and the light chain variable region comprises a sequence having at least 85%, preferably at least 90%, more preferably at least 95%, even more preferably at least 98%, and most preferably at least 99% identity to SEQ ID NO: 1965; and wherein the antibody inhibits TREM2 cleavage;
[0370] (3) an antibody, wherein the CDR1 of the heavy chain variable region comprises the amino acid sequence of SEQ ID NO: 1975; the CDR2 of the heavy chain variable region comprises the amino acid sequence of SEQ ID NO: 1985; the CDR3 of the heavy chain variable region comprises the amino acid sequence of SEQ ID NO: 1995; the CDR1 of the light chain variable region comprises the amino acid sequence of SEQ ID NO: 2005; the CDR2 of the light chain variable region comprises the amino acid sequence of SEQ ID NO: 2015; and the CDR3 of the light chain variable region comprises the amino acid sequence of SEQ ID NO: 2025; and wherein the antibody inhibits TREM2 cleavage; or
[0371] (4) an antibody, wherein the CDR1 of the heavy chain variable region comprises an amino acid sequence having at least 70%, preferably at least 75%, more preferably at least 80%, and most preferably at least 85% identity to SEQ ID NO: 1975; the CDR2 of the heavy chain variable region comprises an amino acid sequence having at least 70%, preferably at least 75%, more preferably at least 80%, even more preferably at least 85%, and most preferably at least 90% identity to SEQ ID NO: 1985; the CDR3 of the heavy chain variable region comprises an amino acid sequence having at least 70%, preferably at least 75%, more preferably at least 80%, even more preferably at least 85%, and most preferably at least 90% identity to SEQ ID NO: 1995; the CDR1 of the light chain variable region comprises an amino acid sequence having at least 70%, preferably at least 75%, more preferably at least 80%, even more preferably at least 85%, and most preferably at least 90% identity to SEQ ID NO: 2005; the CDR2 of the light chain variable region comprises an amino acid sequence having at least 60%, preferably 100% identity to SEQ ID NO: 2015; and the CDR3 of the light chain variable region comprises an amino acid sequence having at least 70%, preferably at least 75%, more preferably at least 80%, and most preferably at least 85% identity to SEQ ID NO: 2025; and wherein the antibody inhibits TREM2 cleavage.

[0372] In some embodiments, the antibody is antibody clone 14D3, which is:
[0373] (1) an antibody, wherein the heavy chain variable region comprises the sequence of SEQ ID NO: 1946 and the light chain variable region comprises the sequence of SEQ ID NO: 1956; and wherein the antibody inhibits TREM2 cleavage;
[0374] (2) an antibody, wherein the heavy chain variable region comprises a sequence having at least 85% identity to SEQ ID NO: 1946, and the light chain variable region comprises a sequence having at least 85% identity to SEQ ID NO: 1956; and wherein the antibody inhibits TREM2 cleavage;
[0375] (3) an antibody, wherein the CDR1 of the heavy chain variable region comprises the amino acid sequence of SEQ ID NO: 1966; the CDR2 of the heavy chain variable region comprises the amino acid sequence of SEQ ID NO: 1976; the CDR3 of the heavy chain variable region comprises the amino acid sequence of SEQ ID NO: 1986; the CDR1 of the light chain variable region comprises the amino acid sequence of SEQ ID NO: 1996; the CDR2 of the light chain variable region comprises the amino acid sequence of SEQ ID NO: 2006; and the CDR3 of the light chain variable region comprises the amino acid sequence of SEQ ID NO: 2016; and wherein the antibody inhibits TREM2 cleavage; or
[0376] (4) an antibody, wherein the CDR1 of the heavy chain variable region comprises an amino acid sequence having at least 70% identity to SEQ ID NO: 1966; the CDR2 of the heavy chain variable region comprises an amino acid sequence having at least 70% identity to SEQ ID NO: 1976; the CDR3 of the heavy chain variable region comprises an amino acid sequence having at least 70% identity to SEQ ID NO: 1986; the CDR1 of the light chain variable region comprises an amino acid sequence having at least 70% identity to SEQ ID NO: 1996; the CDR2 of the light chain variable region comprises an amino acid sequence having at least 60% identity to SEQ ID NO: 2006; and the CDR3 of the light chain variable region comprises an amino acid sequence having at least 70% identity to SEQ ID NO: 2016; and wherein the antibody inhibits TREM2 cleavage.

[0377] In some embodiments, the antibody is antibody clone 14D8, which is:
[0378] (1) an antibody, wherein the heavy chain variable region comprises the sequence of SEQ ID NO: 1947 and the light chain variable region comprises the sequence of SEQ ID NO: 1957; and wherein the antibody inhibits TREM2 cleavage;
[0379] (2) an antibody, wherein the heavy chain variable region comprises a sequence having at least 85% identity to SEQ ID NO: 1947, and the light chain variable region comprises a sequence having at least 85% identity to SEQ ID NO: 1957; and wherein the antibody inhibits TREM2 cleavage;
[0380] (3) an antibody, wherein the CDR1 of the heavy chain variable region comprises the amino acid sequence of SEQ ID NO: 1967; the CDR2 of the heavy chain variable region comprises the amino acid sequence of SEQ ID NO: 1977; the CDR3 of the heavy chain variable region comprises the amino acid sequence of SEQ ID NO: 1987; the CDR1 of the light chain variable region comprises the amino acid sequence of SEQ ID NO: 1997; the CDR2 of the light chain variable region comprises the amino acid sequence of SEQ ID NO: 2007; and the CDR3 of the light chain variable region comprises the amino acid sequence of SEQ ID NO: 2017; and wherein the antibody inhibits TREM2 cleavage; or
[0381] (4) an antibody, wherein the CDR1 of the heavy chain variable region comprises an amino acid sequence having at least 70% identity to SEQ ID NO: 1967; the CDR2 of the heavy chain variable region comprises an amino acid sequence having at least 70% identity to SEQ ID NO: 1977; the CDR3 of the heavy chain variable region comprises an amino acid sequence having at least 70% identity to SEQ ID NO: 1987; the CDR1 of the light chain variable region comprises an amino acid sequence having at least 70% identity to SEQ ID NO: 1997; the CDR2 of the light chain variable region comprises an amino acid sequence having at least 60% identity to SEQ ID NO: 2007; and the CDR3 of the light chain variable region comprises an amino acid sequence having at least 70% identity to SEQ ID NO: 2017; and wherein the antibody inhibits TREM2 cleavage.

[0382] In some embodiments, the antibody is antibody clone 7A12, which is:
[0383] (1) an antibody, wherein the heavy chain variable region comprises the sequence of SEQ ID NO: 1948 and the light chain variable region comprises the sequence of SEQ ID NO: 1958; and wherein the antibody inhibits TREM2 cleavage;
[0384] (2) an antibody, wherein the heavy chain variable region comprises a sequence having at least 85%, preferably at least 90%, more preferably at least 95%, even more preferably at least 98%, and most preferably at least 99% identity to SEQ ID NO: 1948, and the light chain variable region comprises a sequence having at least 85%, preferably at least 90%, more preferably at least 95%, even more preferably at least 98%, and most preferably at least 99% identity to SEQ ID NO: 1958; and wherein the antibody inhibits TREM2 cleavage;
[0385] (3) an antibody, wherein the CDR1 of the heavy chain variable region comprises the amino acid sequence of SEQ ID NO: 1968; the CDR2 of the heavy chain variable region comprises the amino acid sequence of SEQ ID NO: 1978; the CDR3 of the heavy chain variable region comprises the amino acid sequence of SEQ ID NO: 1988; the CDR1 of the light chain variable region comprises the amino acid sequence of SEQ ID NO: 1998; the CDR2 of the light chain variable region comprises the amino acid sequence of SEQ ID NO: 2008; and the CDR3 of the light chain variable region comprises the amino acid sequence of SEQ ID NO: 2018; and wherein the antibody inhibits TREM2 cleavage; or
[0386] (4) an antibody, wherein the CDR1 of the heavy chain variable region comprises an amino acid sequence having at least 70%, preferably at least 75%, more preferably at least 80%, and most preferably at least 85% identity to SEQ ID NO: 1968; the CDR2 of the heavy chain variable region comprises an amino acid sequence having at least 70%, preferably at least 75%, more preferably at least 80%, even more preferably at least 85%, and most preferably at least 90% identity to SEQ ID NO: 1978; the CDR3 of the heavy chain variable region comprises an amino acid sequence having at least 70%, preferably at least 75%, more preferably at least 80%, even more preferably at least 85%, and most preferably at least 90% identity to SEQ ID NO: 1988; the CDR1 of the light chain variable region comprises an amino acid sequence having at least 70%, preferably at least 75%, more preferably at least 80%, even more preferably at least 85%, and most preferably at least 90% identity to SEQ ID NO: 1998; the CDR2 of the light chain variable region comprises an amino acid sequence having at least 60%, preferably 100% identity to SEQ ID NO: 2008; and the CDR3 of the light chain variable region comprises an amino acid sequence having at least 70%, preferably at least 75%, more preferably at least 80%, and most preferably at least 85% identity to SEQ ID NO: 2018; and wherein the antibody inhibits TREM2 cleavage.

[0387] In some embodiments, the antibody is antibody clone 8A11, which is:
[0388] (1) an antibody, wherein the heavy chain variable region comprises the sequence of SEQ ID NO: 1949 and the light chain variable region comprises the sequence of SEQ ID NO: 1959; and wherein the antibody inhibits TREM2 cleavage;
[0389] (2) an antibody, wherein the heavy chain variable region comprises a sequence having at least 85%, preferably at least 90%, more preferably at least 95%, even more preferably at least 98%, and most preferably at least 99% identity to SEQ ID NO: 1949, and the light chain variable region comprises a sequence having at least 85%, preferably at least 90%, more preferably at least 95%, even more preferably at least 98%, and most preferably at least 99% identity to SEQ ID NO: 1959; and wherein the antibody inhibits TREM2 cleavage;
[0390] (3) an antibody, wherein the CDR1 of the heavy chain variable region comprises the amino acid sequence of SEQ ID NO: 1969; the CDR2 of the heavy chain variable region comprises the amino acid sequence of SEQ ID NO: 1979; the CDR3 of the heavy chain variable region comprises the amino acid sequence of SEQ ID NO: 1989; the CDR1 of the light chain variable region comprises the amino acid sequence of SEQ ID NO: 1999; the CDR2 of the light chain variable region comprises the amino acid sequence of SEQ ID NO: 2009; and the CDR3 of the light chain variable region comprises the amino acid sequence of SEQ ID NO: 2019; and wherein the antibody inhibits TREM2 cleavage; or
[0391] (4) an antibody, wherein the CDR1 of the heavy chain variable region comprises an amino acid sequence having at least 70%, preferably at least 75%, more preferably at least 80%, and most preferably at least 85% identity to SEQ ID NO: 1969; the CDR2 of the heavy chain variable region comprises an amino acid sequence having at least 70%, preferably at least 75%, more preferably at least 80%, even more preferably at least 85%, and most preferably at least 90% identity to SEQ ID NO: 1979; the CDR3 of the heavy chain variable region comprises an amino acid sequence having at least 70%, preferably at least 75%, more preferably at least 80%, even more preferably at least 85%, and most preferably at least 90% identity to SEQ ID NO: 1989; the CDR1 of the light chain variable region comprises an amino acid sequence having at least 70%, preferably at least 75%, more preferably at least 80%, even more preferably at least 85%, and most preferably at least 90% identity to SEQ ID NO: 1999; the CDR2 of the light chain variable region comprises an amino acid sequence having at least 60%, preferably 100% identity to SEQ ID NO: 2009; and the CDR3 of the light chain variable region comprises an amino acid sequence having at least 70%, preferably at least 75%, more preferably at least 80%, and most preferably at least 85% identity to SEQ ID NO: 2019; and wherein the antibody inhibits TREM2 cleavage.

[0392] In some embodiments, the antibody is antibody clone 21A3, which is:
[0393] (1) an antibody, wherein the heavy chain variable region comprises the sequence of SEQ ID NO: 1950 and the light chain variable region comprises the sequence of SEQ ID NO: 1960; and wherein the antibody inhibits TREM2 cleavage;
[0394] (2) an antibody, wherein the heavy chain variable region comprises a sequence having at least 85%, preferably at least 90%, more preferably at least 95%, even more preferably at least 98%, and most preferably at least 99% identity to SEQ ID NO: 1950, and the light chain variable region comprises a sequence having at least 85%, preferably at least 90%, more preferably at least 95%, even more preferably at least 98%, and most preferably at least 99% identity to SEQ ID NO: 1960; and wherein the antibody inhibits TREM2 cleavage;
[0395] (3) an antibody, wherein the CDR1 of the heavy chain variable region comprises the amino acid sequence of SEQ ID NO: 1970; the CDR2 of the heavy chain variable region comprises the amino acid sequence of SEQ ID NO: 1980; the CDR3 of the heavy chain variable region comprises the amino acid sequence of SEQ ID NO: 1990; the CDR1 of the light chain variable region comprises the amino acid sequence of SEQ ID NO: 2000; the CDR2 of the light chain variable region comprises the amino acid sequence of SEQ ID NO: 2010; and the CDR3 of the light chain variable region comprises the amino acid sequence of SEQ ID NO: 2020; and wherein the antibody inhibits TREM2 cleavage; or
[0396] (4) an antibody, wherein the CDR1 of the heavy chain variable region comprises an amino acid sequence having at least 70%, preferably at least 75%, more preferably at least 80%, and most preferably at least 85% identity to SEQ ID NO: 1970; the CDR2 of the heavy chain variable region comprises an amino acid sequence having at least 70%, preferably at least 75%, more preferably at least 80%, even more preferably at least 85%, and most preferably at least 90% identity to SEQ ID NO: 1980; the CDR3 of the heavy chain variable region comprises an amino acid sequence having at least 70%, preferably at least 75%, more preferably at least 80%, even more preferably at least 85%, and most preferably at least 90% identity to SEQ ID NO: 1990; the CDR1 of the light chain variable region comprises an amino acid sequence having at least 70%, preferably at least 75%, more preferably at least 80%, even more preferably at least 85%, and most preferably at least 90% identity to SEQ ID NO: 2000; the CDR2 of the light chain variable region comprises an amino acid sequence having at least 60%, preferably 100% identity to SEQ ID NO: 2010; and the CDR3 of the light chain variable region comprises an amino acid sequence having at least 70%, preferably at least 75%, more preferably at least 80%, and most preferably at least 85% identity to SEQ ID NO: 2020; and wherein the antibody inhibits TREM2 cleavage.

[0397] In some embodiments, the antibody is antibody clone 10C3, which is:
[0398] (1) an antibody, wherein the heavy chain variable region comprises the sequence of SEQ ID NO: 1951 and the light chain variable region comprises the sequence of SEQ ID NO: 1961; and wherein the antibody inhibits TREM2 cleavage;
[0399] (2) an antibody, wherein the heavy chain variable region comprises a sequence having at least 85%, preferably at least 90%, more preferably at least 95%, even more preferably at least 98%, and most preferably at least 99% identity to SEQ ID NO: 1951, and the light chain variable region comprises a sequence having at least 85%, preferably at least 90%, more preferably at least 95%, even more preferably at least 98%, and most preferably at least 99% identity to SEQ ID NO: 1961; and wherein the antibody inhibits TREM2 cleavage;
[0400] (3) an antibody, wherein the CDR1 of the heavy chain variable region comprises the amino acid sequence of SEQ ID NO: 1971; the CDR2 of the heavy chain variable region comprises the amino acid sequence of SEQ ID NO: 1981; the CDR3 of the heavy chain variable region comprises the amino acid sequence of SEQ ID NO: 1991; the CDR1 of the light chain variable region comprises the amino acid sequence of SEQ ID NO: 2001; the CDR2 of the light chain variable region comprises the amino acid sequence of SEQ ID NO: 2011; and the CDR3 of the light chain variable region comprises the amino acid sequence of SEQ ID NO: 2021; and wherein the antibody inhibits TREM2 cleavage; or
[0401] (4) an antibody, wherein the CDR1 of the heavy chain variable region comprises an amino acid sequence having at least 70%, preferably at least 75%, more preferably at least 80%, and most preferably at least 85% identity to SEQ ID NO: 1971; the CDR2 of the heavy chain variable region comprises an amino acid sequence having at least 70%, preferably at least 75%, more preferably at least 80%, even more preferably at least 85%, and most preferably at least 90% identity to SEQ ID NO: 1981; the CDR3 of the heavy chain variable region comprises an amino acid sequence having at least 70%, preferably at least 75%, more preferably at least 80%, even more preferably at least 85%, and most preferably at least 90% identity to SEQ ID NO: 1991; the CDR1 of the light chain variable region comprises an amino acid sequence having at least 70%, preferably at least 75%, more preferably at least 80%, even more preferably at least 85%, and most preferably at least 90% identity to SEQ ID NO: 2001; the CDR2 of the light chain variable region comprises an amino acid sequence having at least 60%, preferably 100% identity to SEQ ID NO: 2011; and the CDR3 of the light chain variable region comprises an amino acid sequence having at least 70%, preferably at least 75%, more preferably at least 80%, and most preferably at least 85% identity to SEQ ID NO: 2021; and wherein the antibody inhibits TREM2 cleavage.

[0402] In some embodiments, the antibody is antibody clone 18F9, which is:
[0403] (1) an antibody, wherein the heavy chain variable region comprises the sequence of SEQ ID NO: 1952 and the light chain variable region comprises the sequence of SEQ ID NO: 1962; and wherein the antibody inhibits TREM2 cleavage;
[0404] (2) an antibody, wherein the heavy chain variable region comprises a sequence having at least 85%, preferably at least 90%, more preferably at least 95%, even more preferably at least 98%, and most preferred at least 99% identity to SEQ ID NO: 1952, and the light chain variable region comprises a sequence having at least 85%, preferably at least 90%, more preferably at least 95%, even more preferably at least 98%, and most preferably at least 99% identity to SEQ ID NO: 1962; and wherein the antibody inhibits TREM2 cleavage;
[0405] (3) an antibody, wherein the CDR1 of the heavy chain variable region comprises the amino acid sequence of SEQ ID NO: 1972; the CDR2 of the heavy chain variable region comprises the amino acid sequence of SEQ ID NO: 1982; the CDR3 of the heavy chain variable region comprises the amino acid sequence of SEQ ID NO: 1992; the CDR1 of the light chain variable region comprises the amino acid sequence of SEQ ID NO: 2002; the CDR2 of the light chain variable region comprises the amino acid sequence of SEQ ID NO: 2012; and the CDR3 of the light chain variable region comprises the amino acid sequence of SEQ ID NO: 2022; and wherein the antibody inhibits TREM2 cleavage; or
[0406] (4) an antibody, wherein the CDR1 of the heavy chain variable region comprises an amino acid sequence having at least 70%, preferably at least 75%, more preferably at least 80%, and most preferably at least 85% identity to SEQ ID NO: 1972; the CDR2 of the heavy chain variable region comprises an amino acid sequence having at least 70%, preferably at least 75%, more preferably at least 80%, even more preferably at least 85%, and most preferably at least 90% identity to SEQ ID NO: 1982; the CDR3 of the heavy chain variable region comprises an amino acid sequence having at least 70%, preferably at least 75%, more preferably at least 80%, even more preferably at least 85%, and most preferably at least 90% identity to SEQ ID NO: 1992; the CDR1 of the light chain variable region comprises an amino acid sequence having at least 70%, preferably at least 75%, more preferably at least 80%, even more preferably at least 85%, and most preferably at least 90% identity to SEQ ID NO: 2002; the CDR2 of the light chain variable region comprises an amino acid sequence having at least 60%, preferably 100% identity to SEQ ID NO: 2012; and the CDR3 of the light chain variable region comprises an amino acid sequence having at least 70%, preferably at least 75%, more preferably at least 80%, and most preferably at least 85% identity to SEQ ID NO: 2022; and wherein the antibody inhibits TREM2 cleavage.

[0407] In some embodiments, the antibody is antibody clone 15C5, which is:
[0408] (1) an antibody, wherein the heavy chain variable region comprises the sequence of SEQ ID NO: 1953 and the light chain variable region comprises the sequence of SEQ ID NO: 1963; and wherein the antibody inhibits TREM2 cleavage;
[0409] (2) an antibody, wherein the heavy chain variable region comprises a sequence having at least 85%, preferably at least 90%, more preferably at least 95%, even more preferably at least 98%, and most preferably at least 99% identity to SEQ ID NO: 1953, and the light chain variable region comprises a sequence having at least 85%, preferably at least 90%, more preferably at least 95%, even more preferably at least 98%, and most preferably at least 99% identity to SEQ ID NO: 1963; and wherein the antibody inhibits TREM2 cleavage;
[0410] (3) an antibody, wherein the CDR1 of the heavy chain variable region comprises the amino acid sequence of SEQ ID NO: 1973; the CDR2 of the heavy chain variable region comprises the amino acid sequence of SEQ ID NO: 1983; the CDR3 of the heavy chain variable region comprises the amino acid sequence of SEQ ID NO: 1993; the CDR1 of the light chain variable region comprises the amino acid sequence of SEQ ID NO: 2003; the CDR2 of the light chain variable region comprises the amino acid sequence of SEQ ID NO: 2013; and the CDR3 of the light chain variable region comprises the amino acid sequence of SEQ ID NO: 2023; and wherein the antibody inhibits TREM2 cleavage; or
[0411] (4) an antibody, wherein the CDR1 of the heavy chain variable region comprises an amino acid sequence having at least 70%, preferably at least 75%, more preferably at least 80%, and most preferably at least 85% identity to SEQ ID NO: 1973; the CDR2 of the heavy chain variable region comprises an amino acid sequence having at least 70%, preferably at least 75%, more preferably at least 80%, even more preferably at least 85%, and most preferably at least 90% identity to SEQ ID NO: 1983; the CDR3 of the heavy chain variable region comprises an amino acid sequence having at least 70%, preferably at least 75%, more preferably at least 80%, even more preferably at least 85%, and most preferably at least 90% identity to SEQ ID NO: 1993; the CDR1 of the light chain variable region comprises an amino acid sequence having at least 70%, preferably at least 75%, more preferably at least 80%, even more preferably at least 85%, and most preferably at least 90% identity to SEQ ID NO: 2003; the CDR2 of the light chain variable region comprises an amino acid sequence having at least 60%, preferably 100% identity to SEQ ID NO: 2013; and the CDR3 of the light chain variable region comprises an amino acid sequence having at least 70%, preferably at least 75%, more preferably at least 80%, and most preferably at least 85% identity to SEQ ID NO: 2023; and wherein the antibody inhibits TREM2 cleavage.

[0412] In some embodiments, the antibody is antibody clone 1G6, which is:
[0413] (1) an antibody, wherein the heavy chain variable region comprises the sequence of SEQ ID NO: 1954 and the light chain variable region comprises the sequence of SEQ ID NO: 1964; and wherein the antibody inhibits TREM2 cleavage;
[0414] (2) an antibody, wherein the heavy chain variable region comprises a sequence having at least 85%, preferably at least 90%, more preferably at least 95%, even more preferably at least 98%, and most preferably at least 99% identity to SEQ ID NO: 1954, and the light chain variable region comprises a sequence having at least 85%, preferably at least 90%, more preferably at least 95%, even more preferably at least 98%, and most preferably at least 99% identity to SEQ ID NO: 1964; and wherein the antibody inhibits TREM2 cleavage;
[0415] (3) an antibody, wherein the CDR1 of the heavy chain variable region comprises the amino acid sequence of SEQ ID NO: 1974; the CDR2 of the heavy chain variable region comprises the amino acid sequence of SEQ ID NO: 1984; the CDR3 of the heavy chain variable region comprises the amino acid sequence of SEQ ID NO: 1994; the CDR1 of the light chain variable region comprises the amino acid sequence of SEQ ID NO: 2004; the CDR2 of the light chain variable region comprises the amino acid sequence of SEQ ID NO: 2014; and the CDR3 of the light chain variable region comprises the amino acid sequence of SEQ ID NO: 2024; and wherein the antibody inhibits TREM2 cleavage; or
[0416] (4) an antibody, wherein the CDR1 of the heavy chain variable region comprises an amino acid sequence having at least 70%, preferably at least 75%, more preferably at least 80%, and most preferably at least 85% identity to SEQ ID NO: 1974; the CDR2 of the heavy chain variable region comprises an amino acid sequence having at least 70%, preferably at least 75%, more preferably at least 80%, even more preferably at least 85%, and most preferably at least 90% identity to SEQ ID NO: 1984; the CDR3 of the heavy chain variable region comprises an amino acid sequence having at least 70%, preferably at least 75%, more preferably at least 80%, even more preferably at least 85%, and most preferably at least 90% identity to SEQ ID NO: 1994; the CDR1 of the light chain variable region comprises an amino acid sequence having at least 70%, preferably at least 75%, more preferably at least 80%, even more preferably at least 85%, and most preferably at least 90% identity to SEQ ID NO: 2004; the CDR2 of the light chain variable region comprises an amino acid sequence having at least 60%, preferably 100% identity to SEQ ID NO: 2014; and the CDR3 of the light chain variable region comprises an amino acid sequence having at least 70%, preferably at least 75%, more preferably at least 80%, and most preferably at least 85% identity to SEQ ID NO: 2024; and wherein the antibody inhibits TREM2 cleavage.

[0417] In some embodiments, the antibody is an antibody disclosed in FIG. 9 of PCT Patent Application Publication No. WO2018/015573A1, reproduced below as Tables 14A-14D.

TABLE 14A

| | | SEQ |
|---|---|---|
| Clone | | ID |
| name | Variable region of the heavy chain | NO |
| 14D3 | EVKLLEFGGGLVQPGGSMRLSCAASGFTFTDFYMNWI | 1946 |
| | RQPAGRAPEWLGLIRNKTKGYTTEYNRSVKGRFTISR | |
| | DNTQNMLYLQMNSLRPEDTATYYCARIGVNNGGSLDY | |
| | WGQGVMVTVSS | |
| 14D8 | EVKLLESGGGLVQPGGSMRLSCAASGFTFTDFYMNWI | 1947 |
| | RQPAGKAPEWLGLIRNKANGYTTVYNPSVKGRFTISR | |
| | DNTQNMLYLQMNTLRGEDTATYYCARIGINNGGSLDY | |
| | WGQGVMVTVSS | |
| 7AI2 | EVKLLESGGGLVQPGGSMRLSCAASGFTFTDFYMNWI | 1948 |
| | RQPAGKAPEWLGLIRNKANGYTTQYNPSVKGRFTISR | |
| | DNTQNMLYLQMNTLRGEDTATYYCARIGINNGGSLDY | |
| | WGQGVMVTVSS | |
| 8A11 | EVKLLESGGGLVQPGGSMRLSCAASGFTFTDFYMNWI | 1949 |
| | RQPAGKAPEWLGLIRNKTKGYTTEYNTSVKGRFTISR | |
| | DNTQNMLYLQMNSLRPEDTATYYCARIGVNNGGSLDY | |
| | WGQGVMVTVSS | |
| 21A3 | EVKLLESGGGLVQPGGSMRLSCAASGFTFTDFYMNWI | 1950 |
| | RQPAGKAPEWLGLIRNKANGYTTQYNPSVKGRFTISR | |
| | DNTQNMLYLQMNTLRGEDTATYYCARIGINNGGSLDY | |
| | WGQGVMVTVSS | |
| 10C3 | EVKLLESGGGLVQPGGSMRLSCAASGFTFTDFYMNWI | 1951 |
| | RQPAGETPEWLGLIRNKTKGYTTEYNPSVKGRFTISR | |
| | DNTQNMLYLQMNSLRPEDTATYYCARIGTNNGGSLDY | |
| | WGQGVMVIVSS | |
| 18F9 | EVKLLESGGGLVQPGGSMRLSCVVSGFTFTDFYMNWI | 1952 |
| | RQAAGKAPEWLGLIRNKVNGYRTEYNPSVKGRFTISR | |
| | DNIQNMLYLQMNTLRAEDTATYYCARIGINNGGSLDY | |
| | WGQGVMVTVSS | |
| 15C5 | EVKLLESGGGLVQPGGSMRLSCAASGFTFTDFYMNWI | 1953 |
| | RQPAGKAPEWLGLIRNKAYGYTTEYNPSVKGRFTISR | |
| | DNTQDMLYLQMNTLRAEDTATYYCARIGINYGGSLDY | |
| | WGQGVMVTVSS | |
| 1G6 | EVKLLESGGGLVQPGGSLRLSCVASGFTFTDFYMNWI | 1954 |
| | RQPAGKAPEWLGLIRNKANGFTTEYNPSVKGRFTISR | |
| | DNTQHMLYLQMNTLRAEDTATYYCARIGINNGGSLDY | |
| | WGQGVMVTVSS | |
| Con- | EVKLLESGGGLVQPGGSMRLSCAASGFTFTDFYMNWI | 1955 |
| sensus | RQPAGKAPEWLGLIRNKANGYTTEYNPSVKGRFTISR | |
| se- | DNTQNMLYLQMNTLREDTATYYCARIGINNGGSLDY | |
| quence | WGQGVMVTVSS | |

TABLE 14B

| | | SEQ |
|---|---|---|
| Clone | | ID |
| name | Variable region of the light chain | NO |
| 14D3 | DILIIQSPASLTVSAGARVTMSCKSSQSLLYSENNQD | 1956 |
| | YLAWYQQKPGQFPKLLIYGASNRHTGVPDRFTGSGSG | |
| | TDFTLTISSVQAEDLADYYCEQTYSYPYTFGAGTKLE | |
| | LK | |
| 14D8 | DILINQSPASLTVSTGEKVTMSCRSSQSLLYSEKNQD | 1957 |
| | YLAWYQQKPGQFPKLLIYGASYRHTGVPDRFTGSGSG | |
| | TDFTLTISSVQAEDLADYYCEQTYSYPYTFGAGTKLE | |
| | LK | |
| 7AI2 | DILINQSPASLTVSAGEKVTMSCKSSQSLLYSEKNQD | 1958 |
| | YLAWYQQKPGQSPKLLMYGASYRHTGVPDRFTGSGSG | |
| | TDFTLTISSVQAEDLADYYCEQTYSYPYTFGAGTKLE | |
| | LK | |
| 8A11 | DILIIQSPASLTVSAGARVTMSCKSSQSLLYSENNQD | 1959 |
| | YLAWYQQKPGQFPKLLIYGASNRHTGVPDRFTGSGSG | |
| | TDFTLTISSVQAEDLADYYCEQTYSYPYTFGAGTKLE | |
| | LK | |
| 21A3 | DILINQSPASLTVSAGEKVTMSCKSSQSLLYSEKNQD | 1960 |
| | YLAWYQQKPGQSPKLLMYGASYRHTGVPDRFTGSGSG | |
| | TDFTLTISSVQAEDLADYYCEQTYSYPYTFGAGTKLE | |
| | LK | |
| 10C3 | DILIIQSPASLIVSAGARVTMSCKSSQSLLYSENNQD | 1961 |
| | YLAWYQQKPGQFPKLLIYGASNRHTGVPDRFTGSGSG | |
| | TDFTLTISSVQAEDLADYYCEQTYSYPYTFGAGTKLE | |
| | LK | |
| 18F9 | DILINQSPASLTVSAGEKVTMSCKSSQSLLYSENNQD | 1962 |
| | YLAWYQQKPGQFPKLLIYGASNRHTGVPDRFTGSGSG | |
| | TDFTLTISSVQAEDLADYYCEQTYSYPYTFGAGTKLE | |
| | LK | |
| 15C5 | DILINQSPASLTVSAGEKVTVSCKSSQSLLYSESNQD | 1963 |
| | YLAWYQQKPGQFPKLLIYGASYRHTGVPDRFTGSGSG | |
| | TDFTLTISSVQAEDLAHYYCEQTYSYPYTFGAGTKLE | |
| | LK | |
| 1G6 | DILINQSPASLTVSTGEKVTMSCKSSQSLLYSENKQD | 1964 |
| | YLAWYQQKPGQFPKLLIYGASNRHTGVPDRFTGSGSG | |
| | TDFTLTINIVQAEDLADYYCEQTYSYPYTFGAGTKLE | |
| | LK | |
| Con- | DILINQSPASLTVSAGEKVTMSCKSSQSLLYS | 1965 |
| sensus | ENNQDYLAWYQQKPGQFPKLLIYGASNRHTGV | |
| se- | PDRFTGSGSGTDFTLTISSVQAEDLADYYCEQ | |
| quence | TYSYPYTFGAGTKLELK | |

TABLE 14C

| | Complementarity determining regions in | | | | | |
|---|---|---|---|---|---|---|
| Clone | the variable region of the heavy chain | | | | | |
| name | CDR1 | SEQ | CDR2 | SEQ | CDR3 | SEQ |
| 14D3 | GFTFTDFY | 1966 | IRNKTKGYTT | 1976 | ARIGVNN | 1986 |
| | | | | | GGSLDYWG | |
| 14D8 | GFTFTDFY | 1967 | IRNKANGYTT | 1977 | ARIGINN | 1987 |
| | | | | | GGSLDYWG | |
| 7AI2 | GFTFTDFY | 1968 | IRNKANGYTT | 1978 | ARIGINN | 1988 |
| | | | | | GGSLDYWG | |
| 8A11 | GFTFTDFY | 1969 | IRNKTKGYTT | 1979 | ARIGVNN | 1989 |
| | | | | | GGSLDYWG | |
| 21A3 | GFTFTDFY | 1970 | IRNKANGYTT | 1980 | ARIGINN | 1990 |
| | | | | | GGSLDYWG | |
| 10C3 | GFTFTDFY | 1971 | IRNKTKGYTT | 1981 | ARIGTNN | 1991 |
| | | | | | GGSLDYWG | |
| 18F9 | GFTFTDFY | 1972 | IRNKVNGYRT | 1982 | ARIGINN | 1992 |
| | | | | | GGSLDYWG | |
| 15C5 | GFTFTDFY | 1973 | IRNKAYGYTT | 1983 | ARIGINY | 1993 |
| | | | | | GGSLDYWG | |
| 1G6 | GFTFTDFY | 1974 | IRNKANGFTT | 1984 | ARIGINN | 1994 |
| | | | | | GGSLDYWG | |
| Con- | GFTFTDF | 1975 | IRNKANGY | 1985 | ARIGIN | 1995 |
| sen- | Y | | TT | | NGGSLDYWG | |
| sus | | | | | | |
| seq | | | | | | |

TABLE 14D

| | Complementarity determining regions in | | | | | |
|---|---|---|---|---|---|---|
| Clone | the variable region of the light chain | | | | | |
| name | CDR1 | SEQ | CDR2 | SEQ | CDR3 | SEQ |
| 14D3 | QSLLYSENNQDY | 1996 | GAS | 2006 | EQTYSYPYT | 2016 |
| 14D8 | QSLLYSEKNQDY | 1997 | GAS | 2007 | EQTYSYPYT | 2017 |
| 7AI2 | QSLLYSEKNQDY | 1998 | GAS | 2008 | EQTYSYPYT | 2018 |
| 8A11 | QSLLYSENNQDY | 1999 | GAS | 2009 | EQTYSYPYT | 2019 |
| 21A3 | QSLLYSEKNQDY | 2000 | GAS | 2010 | EQTYSYPYT | 2020 |
| 10C3 | QSLLYSENNQDY | 2001 | GAS | 2011 | EQTYSYPYT | 2021 |
| 18F9 | QSLLYSENNQDY | 2002 | GAS | 2012 | EQTYSYPYT | 2022 |
| 15C5 | QSLLYSESNQDY | 2003 | GAS | 2013 | EQTYSYPYT | 2023 |
| 1G6 | QSLLYSENKQDY | 2004 | GAS | 2014 | EQTYSYPYT | 2024 |
| Cons- | QSLLYSENNQD | 2005 | GAS | 2015 | EQTYSYPY | 2025 |
| ensus | Y | | | | T | |
| seq | | | | | | |

[0418] In some embodiments, each of the light chain variable regions and each of the heavy chain variable regions disclosed in in the above tables as well as specific combinations thereof and other embodiments of the anti-TREM2 antibody described in the '573 application and herein may be attached to the light chain constant regions (Table 4) and heavy chain constant regions (Table 5) to form complete antibody light and heavy chains, respectively, as further discussed below. Further, each of the generated heavy and light chain sequences may be combined to form a complete antibody structure. It should be understood that the heavy chain and light chain variable regions provided herein can also be attached to other constant domains having different sequences than the exemplary sequences listed herein.

G. PCT Patent Application Publication No. WO2019/055841A1

[0419] In some embodiments, the TREM2 agonist is an antibody or an antigen-binding fragment thereof, as described in PCT Patent Application Publication No. WO2019/055841A1 (“the '841 application”), which is incorporated by reference herein, in its entirety.

[0420] In some embodiments, the TREM2 binding agent comprises an antibody that comprises a light chain variable domain comprising a CDRL1, CDRL2, and CDRL3, and a heavy chain variable domain comprising a CDRH1, CDRH2, and CDRH3 disclosed in the '841 application specification. In some embodiments, the TREM2 binding agent comprises an antibody that comprises a light chain variable domain and a heavy chain variable domain disclosed in the '841 application specification.

[0421] In some embodiments, the antibody comprises one or more (e.g., one, two, three, four, five, or all six) CDRs selected from the group consisting of:
[0422] (a) a heavy chain CDR1 sequence having at least 90% sequence identity to the amino acid sequence of any one of SEQ ID NOs: 2049, 2077, 2080, 2086, 2092, 2098, 2103, 2109, 2115, 2122, 2126, 2347, and 2355 or having up to two amino acid substitutions relative to the amino acid sequence of any one of SEQ ID NOs: 2049, 2077, 2080, 2086, 2092, 2098, 2103, 2109, 2115, 2122, 2126, 2347, and 2355;
[0423] (b) a heavy chain CDR2 sequence having at least 90% sequence identity to the amino acid sequence of any one of SEQ ID NOs: 2050, 2078, 2081, 2087, 2093, 2099, 2104, 2110, 2116, 2120, 2123, 2127, 2348, and 2356 or having up to two amino acid substitutions relative to the amino acid sequence of any one of SEQ ID NOs: 2050, 2078, 2081, 2087, 2093, 2099, 2104, 2110, 2116, 2120, 2123, 2127, 2348, and 2356;
[0424] (c) a heavy chain CDR3 sequence having at least 90% sequence identity to the amino acid sequence of any one of SEQ ID NOs: 2051, 2082, 2088, 2094, 2100, 2105, 2111, 2117, 2124, 2128, 2349, and 2357 or having up to two amino acid substitutions relative to the amino acid sequence of any one of SEQ ID NOs: 2051, 2082, 2088, 2094, 2100, 2105, 2111, 2117, 2124, 2128, 2349, and 2357;
[0425] (d) a light chain CDR1 sequence having at least 90% sequence identity to the amino acid sequence of any one of SEQ ID NOs: 2052, 2083, 2089, 2095, 2101, 2106, 2112, 2118, 2129, and 2351 or having up to two amino acid substitutions relative to the amino acid sequence of any one of SEQ ID NOs: 2052, 2083, 2089, 2095, 2101, 2106, 2112, 2118, 2129, and 2351;
[0426] (e) a light chain CDR2 sequence having at least 90% sequence identity to the amino acid sequence of any one of SEQ ID NOs: 2053, 2079, 2084, 2090, 2096, 2107, 2113, 2352, and 2359 or having up to two amino acid substitutions relative to the amino acid sequence of any one of SEQ ID NOs: 2053, 2079, 2084, 2090, 2096, 2107, 2113, 2352, and 2359; and
[0427] (f) a light chain CDR3 sequence having at least 90% sequence identity to the amino acid sequence of any one of SEQ ID NOs: 2054, 2085, 2091, 2097, 2102, 2108, 2114, 2119, 2121, 2125, 2130, and 2353 or having up to two amino acid substitutions relative to the amino acid sequence of any one of SEQ ID NOs: 2054, 2085, 2091, 2097, 2102, 2108, 2114, 2119, 2121, 2125, 2130, and 2353.

[0428] In some embodiments, the antibody comprises:
[0429] (a) a heavy chain CDR1 sequence comprising the amino acid sequence of SEQ ID NO:2049, a heavy chain CDR2 sequence comprising the amino acid sequence of SEQ ID NO:2050, a heavy chain CDR3 sequence comprising the amino acid sequence of SEQ ID NO:2051, a light chain CDR1 sequence comprising the amino acid sequence of SEQ ID NO:2052, a light chain CDR2 sequence comprising the amino acid sequence of SEQ ID NO:2052, and a light chain CDR3 sequence comprising the amino acid sequence of SEQ ID NO:2053; or
[0430] (b) a heavy chain CDR1 sequence comprising the amino acid sequence of SEQ ID NO:2077, a heavy chain CDR2 sequence comprising the amino acid sequence of SEQ ID NO:2078, a heavy chain CDR3 sequence comprising the amino acid sequence of SEQ ID NO:2051, a light chain CDR1 sequence comprising the amino acid sequence of SEQ ID NO:2052, a light chain CDR2 sequence comprising the amino acid sequence of SEQ ID NO:2079, and a light chain CDR3 sequence comprising the amino acid sequence of SEQ ID NO:2054; or
[0431] (c) a heavy chain CDR1 sequence comprising the amino acid sequence of SEQ ID NO:2080, a heavy chain CDR2 sequence comprising the amino acid sequence of SEQ ID NO:2081, a heavy chain CDR3 sequence comprising the amino acid sequence of SEQ ID NO:2082, a light chain CDR1 sequence comprising the amino acid sequence of SEQ ID NO:2083, a light chain CDR2 sequence comprising the amino acid sequence of SEQ ID NO:2084, and a light chain CDR3 sequence comprising the amino acid sequence of SEQ ID NO:2085; or
[0432] (d) a heavy chain CDR1 sequence comprising the amino acid sequence of SEQ ID NO:2086, a heavy chain CDR2 sequence comprising the amino acid sequence of SEQ ID NO:2087, a heavy chain CDR3 sequence comprising the amino acid sequence of SEQ ID NO:2088, a light chain CDR1 sequence comprising the amino acid sequence of SEQ ID NO:2089, a light chain CDR2 sequence comprising the amino acid sequence of SEQ ID NO:2090, and a light chain CDR3 sequence comprising the amino acid sequence of SEQ ID NO:2091; or
[0433] (e) a heavy chain CDR1 sequence comprising the amino acid sequence of SEQ ID NO:2092, a heavy chain CDR2 sequence comprising the amino acid sequence of SEQ ID NO:2093, a heavy chain CDR3 sequence comprising the amino acid sequence of SEQ ID NO:2094, a light chain CDR1 sequence comprising the amino acid sequence of SEQ ID NO:2095, a light chain CDR2 sequence comprising the amino acid sequence of SEQ ID NO:2096, and a light chain CDR3 sequence comprising the amino acid sequence of SEQ ID NO:2097; or (f) a heavy chain CDR1 sequence comprising the amino acid sequence of SEQ ID NO:2098, a heavy chain CDR2 sequence comprising the amino acid sequence of SEQ ID NO:2099, a heavy chain CDR3 sequence comprising the amino acid sequence of SEQ ID NO:2100, a light chain CDR1 sequence comprising the amino acid sequence of SEQ ID NO:2101, a light chain CDR2 sequence comprising the amino acid sequence of SEQ ID NO:2079, and a light chain CDR3 sequence comprising the amino acid sequence of SEQ ID NO:2102; or
[0434] (g) a heavy chain CDR1 sequence comprising the amino acid sequence of SEQ ID NO:2103, a heavy chain CDR2 sequence comprising the amino acid sequence of SEQ ID NO:2104, a heavy chain CDR3 sequence comprising the amino acid sequence of SEQ ID NO:2105, a light chain CDR1 sequence comprising the amino acid sequence of SEQ ID NO:2106, a light chain CDR2 sequence comprising the amino acid sequence of SEQ ID NO:2107, and a light chain CDR3 sequence comprising the amino acid sequence of SEQ ID NO:2108; or
[0435] (h) a heavy chain CDR1 sequence comprising the amino acid sequence of SEQ ID NO:2109, a heavy chain CDR2 sequence comprising the amino acid sequence of SEQ ID NO:2110, a heavy chain CDR3 sequence comprising the amino acid sequence of SEQ ID NO:2111, a light chain CDR1 sequence comprising the amino acid sequence of SEQ ID NO:2112, a light chain CDR2 sequence comprising the amino acid sequence of SEQ ID NO:2113, and a light chain CDR3 sequence comprising the amino acid sequence of SEQ ID NO:2114; or
[0436] (i) a heavy chain CDR1 sequence comprising the amino acid sequence of SEQ ID NO:2115, a heavy chain CDR2 sequence comprising the amino acid sequence of SEQ ID NO:2116, a heavy chain CDR3 sequence comprising the amino acid sequence of SEQ ID NO:2117, a light chain CDR1 sequence comprising the amino acid sequence of SEQ ID NO:2118, a light chain CDR2 sequence comprising the amino acid sequence of SEQ ID NO:2119, and a light chain CDR3 sequence comprising the amino acid sequence of SEQ ID NO:2119; or
[0437] (j) a heavy chain CDR1 sequence comprising the amino acid sequence of SEQ ID NO:2115, a heavy chain CDR2 sequence comprising the amino acid sequence of SEQ ID NO:2120, a heavy chain CDR3 sequence comprising the amino acid sequence of SEQ ID NO:2117, a light chain CDR1 sequence comprising the amino acid sequence of SEQ ID NO:2118, a light chain CDR2 sequence comprising the amino acid sequence of SEQ ID NO:2079, and a light chain CDR3 sequence comprising the amino acid sequence of SEQ ID NO:2121; or
[0438] (k) a heavy chain CDR1 sequence comprising the amino acid sequence of SEQ ID NO:2123, a heavy chain CDR2 sequence comprising the amino acid sequence of SEQ ID NO:2132, a heavy chain CDR3 sequence comprising the amino acid sequence of SEQ ID NO:2133, a light chain CDR1 sequence comprising the amino acid sequence of SEQ ID NO:2102, a light chain CDR2 sequence comprising the amino acid sequence of SEQ ID NO:2079, and a light chain CDR3 sequence comprising the amino acid sequence of SEQ ID NO:2125; or
[0439] (l) a heavy chain CDR1 sequence comprising the amino acid sequence of SEQ ID NO:2126, a heavy chain CDR2 sequence comprising the amino acid sequence of SEQ ID NO:2127, a heavy chain CDR3 sequence comprising the amino acid sequence of SEQ ID NO:2128, a light chain CDR1 sequence comprising the amino acid sequence of SEQ ID NO:2129, a light chain CDR2 sequence comprising the amino acid sequence of SEQ ID NO:2079, and a light chain CDR3 sequence comprising the amino acid sequence of SEQ ID NO:2130; or
[0440] (m) a heavy chain CDR1 sequence comprising the amino acid sequence of SEQ ID NO:2347, a heavy chain CDR2 sequence comprising the amino acid sequence of SEQ ID NO:2348, a heavy chain CDR3 sequence comprising the amino acid sequence of SEQ ID NO:2349, a light chain CDR1 sequence comprising the amino acid sequence of SEQ ID NO:2351, a light chain CDR2 sequence comprising the amino acid sequence of SEQ ID NO:2352, and a light chain CDR3 sequence comprising the amino acid sequence of SEQ ID NO:2353; or
[0441] (n) a heavy chain CDR1 sequence comprising the amino acid sequence of SEQ ID NO:2355, a heavy chain CDR2 sequence comprising the amino acid sequence of SEQ ID NO:2356, a heavy chain CDR3 sequence comprising the amino acid sequence of SEQ ID NO:2357, a light chain CDR1 sequence comprising the amino acid sequence of SEQ ID NO:2089, a light chain CDR2 sequence comprising the amino acid sequence of SEQ ID NO:2359, and a light chain CDR3 sequence comprising the amino acid sequence of SEQ ID NO:2091.

[0442] In some embodiments, the antibody or antigen-binding portion thereof comprises:
[0443] (a) a heavy chain variable region comprising an amino acid sequence that has at least 90% sequence identity to SEQ ID NO:2047; and a light chain variable region comprising an amino acid sequence that has at least 90% sequence identity to SEQ ID NO:2048; or
[0444] (b) a heavy chain variable region comprising an amino acid sequence that has at least 90% sequence identity to SEQ ID NO:2055; and a light chain variable region comprising an amino acid sequence that has at least 90% sequence identity to SEQ ID NO:2066; or
[0445] (c) a heavy chain variable region comprising an amino acid sequence that has at least 90% sequence identity to SEQ ID NO:2056; and a light chain variable region comprising an amino acid sequence that has at least 90% sequence identity to SEQ ID NO:2067; or
[0446] (d) a heavy chain variable region comprising an amino acid sequence that has at least 90% sequence identity to SEQ ID NO:2057; and a light chain variable region comprising an amino acid sequence that has at least 90% sequence identity to SEQ ID NO:2068; or
[0447] (e) a heavy chain variable region comprising an amino acid sequence that has at least 90% sequence identity to SEQ ID NO:2058; and a light chain variable region comprising an amino acid sequence that has at least 90% sequence identity to SEQ ID NO:2069; or
[0448] (f) a heavy chain variable region comprising an amino acid sequence that has at least 90% sequence identity to SEQ ID NO:2059; and a light chain variable region comprising an amino acid sequence that has at least 90% sequence identity to SEQ ID NO:2070; or
[0449] (g) a heavy chain variable region comprising an amino acid sequence that has at least 90% sequence identity to SEQ ID NO:2060; and a light chain variable region comprising an amino acid sequence that has at least 90% sequence identity to SEQ ID NO:2071; or
[0450] (h) a heavy chain variable region comprising an amino acid sequence that has at least 90% sequence identity to SEQ ID NO:2061; and a light chain variable region comprising an amino acid sequence that has at least 90% sequence identity to SEQ ID NO:2072; or
[0451] (i) a heavy chain variable region comprising an amino acid sequence that has at least 90% sequence identity to SEQ ID NO:2062; and a light chain variable region comprising an amino acid sequence that has at least 90% sequence identity to SEQ ID NO:2073; or
[0452] (j) a heavy chain variable region comprising an amino acid sequence that has at least 90% sequence identity to SEQ ID NO:2063; and a light chain variable region comprising an amino acid sequence that has at least 90% sequence identity to SEQ ID NO:2074; or
[0453] (k) a heavy chain variable region comprising an amino acid sequence that has at least 90% sequence identity to SEQ ID NO:2064; and a light chain variable region comprising an amino acid sequence that has at least 90% sequence identity to SEQ ID NO:2075; or
[0454] (l) a heavy chain variable region comprising an amino acid sequence that has at least 90% sequence identity to SEQ ID NO:2065; and a light chain variable region comprising an amino acid sequence that has at least 90% sequence identity to SEQ ID NO:2076; or
[0455] (m) a heavy chain variable region comprising an amino acid sequence that has at least 90% sequence identity to SEQ ID NO:2346, and a light chain variable region comprising an amino acid sequence that has at least 90% sequence identity to SEQ ID NO:2350; or
[0456] (n) a heavy chain variable region comprising an amino acid sequence that has at least 90% sequence identity to SEQ ID NO:2354, and a light chain variable region comprising an amino acid sequence that has at least 90% sequence identity to SEQ ID NO:2358.

[0457] In some embodiments, the antibody is an antibody disclosed in Table 15 of PCT Patent Application Publication No. WO2019/055841A1, reproduced as Table 15 below. In some embodiments, the antibody is an antibody comprises a light chain variable domain comprising a CDRL1, CDRL2, and CDRL3, and a heavy chain variable domain comprising a CDRH1, CDRH2, and CDRH3 disclosed in Table 15.

TABLE 15

| SEQ | | |
|---|---|---|
| ID | | |
| NO | Sequence | Description |
| 2042 | GGACAGGGATCCAGAGTTCC | muIgG1 3′ primer |
| 2043 | AGCTGGGAAGGTGTGCACAC | muIgG2 3′ primer |
| 2044 | CAGGGGCCAGTGGATAGAC | muIgG3 3′ primer |
| 2045 | GACATTGATGTCTTTGGGGT | muCkappa.1 3′ primer |
| 2046 | TTCACTGCCATCAATCTTCC | muCkappa.2 3′ primer |
| 2047 | QVQLQQPGAELVKPGASVKLSCKASGYTFTSYWMHWVKQSPGRGLEWIG | RS9.F6 VH amino acid |
| | RSDPTTGGTNYNEKFKTKATLTVDKPSSTAYMQLSSLTSDDSAVYYCVRTS | sequence |
| | GTGDYWGQGTSLTVSSAKTTAPSVYPLAPVCGGTTGSSVT | |
| 2048 | DVVMTQTPLSLPVSLGDQASISCRSSQSLVHNNGNTFLHWYLQKPGQSPKL | RS9.F6 VL amino acid |
| | LIYkVSNRFSGVPDRFSGSGSGTDFTLKISRVEAEDLGVYFCSQTTHVPPTFG | sequence |
| | GGTKLEIKRADAAPTVSIFPPSSEQLTSGGASVVCF | |
| 2049 | GYTFTSY | RS9.F6 CDR-H1 amino |
| | | acid sequence |
| 2050 | IGRSDPTTGGTNYNE | RS9.F6 CDR-H2 amino |
| | | acid sequence |
| 2051 | VRTSGTGDY | RS9.F6 and RS.F10 |
| | | CDR-H3 amino acid |
| | | sequence |
| 2052 | RSSQSLVHNNGNTFLH | RS9.F6 and RS.F10 |
| | | CDR-L1 amino acid |
| | | sequence |
| 2053 | VSNRFS | RS9.F6 CDR-L2 amino |
| | | acid sequence |
| 2054 | SQTTHVPPT | RS9.F6 and RS.F10 |
| | | CDR-L3 amino acid |
| | | sequence |
| 2055 | QVQLQQSGAELARPGASVKLSCKASGYTFTSYWIQWVKQRPGQGLEWIG | 21D11 VH amino acid |
| | TIYPGDGDARYTQKFKGKATLTADKSSSTTYMQLNSLASEDSAVYYCARN | sequence |
| | GITTAGYYAMDYWGQGTSVTVSS | |
| 2056 | QVQLQQSGADLLRPGVSVKISCKGSGYTFTDHAMHWVKQSHAESLEWIG | 21D4.D1 VH amino acid |
| | VISTYSGDTGYNQKFKGKATMTVDKSSSTAYLELARLTSEDSAIYYCARE | sequence |
| | GHYDDAMDYWGQGTSVTVSS | |
| 2057 | EVQLQQSGPELVKPGASVKMSCKASGYTFTSYVMHWVKQKPGQGLEWIG | 26D2 VH amino acid |
| | YINPYTDGTKYNEKFKGKATLTSDKSSSTAYMDLSSLTSEDSAVYYCARGE | sequence |
| | VRRYALDYWGQGTSVTVSS | |
| 2058 | QVHLQQSGSELRSPGSSVKLSCKDFDSEVFPISYMSWIRQKPGHGFEWIG | 26E2.A3 VH amino acid |
| | DILPSIGGRIYGVKFEDRATLDADTVSNTAYLELNSLTSEDSAIYYCARKD | sequence; 24B4.A1 VH |
| | YGSLAYWGQGTLVTVSA | amino acid sequence |
| 2059 | EVQLQQSGPELVKPGASVKISCKTSGYTLSEYTMHWVIQSHGKSLEWIGGVI | 3D3.A1 VH amino acid |
| | PNSGGTSYNQKFRDKASLTVDKSSSTAYLELRSLTSEDSAVYYCARGDDSY | sequence |
| | RRGYALDYWGQGTSVTVSS | |
| 2060 | EVQLQQSGAEVVKPGASVKLSCTASGFNIKDTYMHWVKQRPEQGLEWI | 40H3.A4 VH amino acid |
| | GRIDPANGNTKYDPKFQGKATITADTSSNTAYLQLSSLTSEDTAVYYCAT | sequence |
| | LFAYWGQGTLVTVSA | |
| 2061 | DVQLQESGPGLVKPSQSLSLTCTVTGYSITSDYAWNWIRQFPGNKLEWM | 42E8.H1 VH amino acid |
| | GYINYSGRTIYNPSLKSRISITRDTSKNHFFLQLISVTTEDTATYYCARWNG | sequence |
| | NYGFAYWGQGTLVTVSA | |
| 2062 | DVQLQESGPGLVKPSQSLSLTCTVTGYSITSDYAWNWIRQFPGNRLEWM | 49H1 LB 1 VH amino acid |
| | GYISFSGSTSYNPSLKSRISTRDTSKNQFFLQLNSVTTEDTATYYCARWNG | sequence |
| | NYGFAYWGQGTLVTVSA | |
| 2063 | QVHLQQSGSELRSPGSSVKLSCKDFDSEVFPIAYMSWVRQKPGHGFEWIG | 54C2.A1 VH amino acid |
| | DILPSIGRRIYGVKFEDKATLDADTVSNTAYLELNSLTSEDSAIYYCTRKDY | sequence |
| | GSLAYWGQGTLVTVSA | |
| 2064 | QVQLKESGPGLVAPSQSLSITCTVSGFSLSRYSVYWVRQPPGKGLEWLGMI | 57D7.A1 VH amino acid |
| | WGGGNTDYNSALKSRLSISKDNSKSQVFLKMNSLQTDDSAMYYCVQYG | sequence |
| | GMDYWGQGTSVTVSS | |
| 2065 | QVQLQQPGAELVKPGASVKLSCKASGYTFTSYWMHWVKQSPGRGLEWI | RS9.F6 VH amino acid |
| | GRSDPTTGGTNYNEKFKTKATLTVDKPSSTAYMQLSSLTSDDSAVYYCV | sequence; RS.F10 VH |
| | RTSGTGDYWGQGTSLTVSS | amino acid sequence |
| 2066 | DIQMTQSPASLSVSVGETVTITCRASENIYSNLAWYQQKQGRSPQLLVYA | 2 ID 11 VL amino acid |
| | ATNLADGVPSRFSGSGSGTQYSLKINSLQSEDFGYYYCQHFWGTPYTFGG | sequence |
| | GTKVEIK | |
| 2067 | DVVMTQTPLTLSVTIGQPASFSCKSSQSLLDSDGKTYLNWLLRRPGQSP | 2 1D4.D 1 VL amino |
| | KRLIYVVSKLDSGVPDRFTGSGSGTDFTLKISRVEAEDLGVYYCWQGTH | acid sequence |
| | FPYTFGGGTKLEIK | |
| 2068 | DIQMTQSSSSFSVSLGDRVTITCKASEDIYNRLAWYQQKPGNAPRLLISGA | 26D2 VL amino acid |
| | TSLETGVPSRFSGSGSGKDYTLSITSLQTEDVATYYCQQYWSTPWTFGGG | sequence |
| | TKLEIK | |
| 2069 | DVVMTQTPLSLPVSLGDQASISCRSSQSLVHINGNTYLQWFLQKPGQSPK | 26E2.A3 VL amino acid |
| | LLIYKVSNRFSGVPDRFSGSGSGTAFTLKISRVEAEDLGVYFCSQSTHVPY | sequence; 24B4.A1 VL |
| | TFGGGTKLEIK | amino acid sequence |
| 2070 | DIVMSQSPSSLAVSVGEKVTMSCKSSQSLLYSSNQKSYLAWYQQKPGQSP | 3D3.A1 VL amino acid |
| | KLLIYWASTRESGVPDRFRGSGSGTDFTLTISSVKAEDLAVYYCQQYFSYP | sequence |
| | PTFGGGTKLEIK | |
| 2071 | DIVMTQAAFSNPVTLGTSASISCRSSKSLLHSNGITYLYWYLQKPGQSPQL | 40H3.A4 VL amino acid |
| | LIYQMSNLASGVPDRFSSSGSGIDFTLRINRVEAEDVGVYYCAQNLELPTF | sequence |
| | GSGTKLEIK | |
| 2072 | DVVMTQNPLSLPVSLGDQASISCRSSQSLVHINGNTYLHWYLQKPGQSPK | 42E8.H1 VL amino acid |
| | LLIYKVSNRFSGVPDRFSGSGSGTDFTLKISRVEAEDLGVYFCSQTTHALF | sequence |
| | TFGSGTKLEIK | |
| 2073 | DVVMTQTPLSLPVSLGDQASISCRSSQSLVHINGNTYLHWYLQKPGQSPK | 49H1 LB 1 VL amino acid |
| | LLIYKVSNRFSGVPDRFSGSGSGTDFTLKISRVEAEDLGVYFCSQSTHVTF | sequence |
| | TFGSGTKLEIK | |
| 2074 | DVVMTQTPLSLPVSLGDQASISCRSSQSLVHINGNTYLQWYLQKPGQSPKL | 54C2.A1 VL amino acid |
| | LIYKVSNRFSGVPDRFSGSGSGTDFTLRISRVEAEDLGVYFCSQSTHLPYTF | |
| | GGGTKLEIK | |
| 2075 | DVLMTQTPLSLPVSLGDQASISCRSSQSIVHSNGNTYLEWYLQKPGQSPKL | 57D7.A1 VL amino acid |
| | LIYKVSNRFSGVPDRFSGSGSGTDFTLKISRVEAEDLGVYYCFQGSHVPYTF | sequence |
| | GGGTKLEIK | |
| 2076 | DVVMTQTPLSLPVSLGDQASISCRSSQSLVHNNGNTFLHWYLQKPGQSPK | RS9.F6 VL amino acid |
| | LLIYKVSNRFSGVPDRFSGSGSGTDFTLKISRVEAEDLGVYFCSQTTHVPPT | sequence; RS.F10 VL |
| | FGGGTKLEIK | amino acid sequence |
| 2077 | GYTFTSYWMH | RS9.F6 and RS.F10 |
| | | CDR-H1 |
| 2078 | RSDPTTGGTNYNEKFKT | RS9.F6 and RS.F10 |
| | | CDR-H2 |
| 2079 | KVSNRFS | RS9.F6, RS.F10, |
| | | 26E2.A3, 24B4.A1, |
| | | 42E8.H1, 49H11.B1, |
| | | 54C2.A1, and 57D7.A1 |
| | | CDR-L2 |
| 2080 | GYTFTSYWIQ | 2 ID 11 CDR-H1 |
| 2081 | TIYPGDGDARYTQKFKG | 2 ID 11 CDR-H2 |
| 2082 | ARNGITTAGYYAMDY | 2 ID 11 CDR-H3 |
| 2083 | RASENIYSNLA | 2 ID 11 CDR-L1 |
| 2084 | AATNLAD | 2 ID 11 CDR-L2 |
| 2085 | QHFWGTPYT | 2 ID 11 CDR-L3 |
| 2086 | GYTFTDHAMH | 21D4.D1 CDR-H1 |
| 2087 | VISTYSGDTGYNQKFKG | 21D4.D1 CDR-H2 |
| 2088 | AREGHYDDAMDY | 21D4.D1 CDR-H3 |
| 2089 | KSSQSLLDSDGKTYLN | 21D4.D1 and 51D4 |
| | | CDR-L1 |
| 2090 | VVSKLDS | 21D4.D1 CDR-L2 |
| 2091 | WQGTHFPYT | 21D4.D1 and 51D4 |
| | | CDR-L3 |
| 2092 | GYTFTSYVMH | 26D2 CDR-H1 |
| 2093 | YINPYTDGTKYNEKFKG | 26D2 CDR-H2 |
| 2094 | ARGEVRRYALDY | 26D2 CDR-H3 |
| 2095 | KASEDIYNRLA | 26D2 CDR-L1 |
| 2096 | GATSLET | 26D2 CDR-L2 |
| 2097 | QQYWSTPWT | 26D2 CDR-L3 |
| 2098 | DSEVFPISYMS | 26E2.A3 and 24B4.A1 |
| | | CDR-H1 |
| 2099 | DILPSIGGRIYGVKF | 26E2.A3 and 24B4.A1 |
| | | CDR-H2 |
| 2100 | ARKDYGSLAY | 26E2.A3 and 24B4.A1 |
| | | CDR-H3 |
| 2101 | RSSQSLVHINGNTYLQ | 26E2.A3, 24B4.A1, and |
| | | 54C2.A1 CDR-L1 |
| 2102 | SQSTHVPYT | 26E2.A3 and 24B4.A1 |
| | | CDR-L3 |
| 2103 | GYTLSEYTMH | 3D3.A1 CDR-H1 |
| 2104 | GVIPNSGGTSYNQKFRD | 3D3.A1 CDR-H2 |
| 2105 | ARGDDSYRRGYALDY | 3D3.A1 CDR-H3 |
| 2106 | KSSQSLLYSSNQKSYLA | 3D3.A1 CDR-L1 |
| 2107 | WASTRES | 3D3.A1 CDR-L2 |
| 2108 | QQYFSYPPT | 3D3.A1 CDR-L3 |
| 2109 | GFNIKDTYMH | 40H3.A4 CDR-H1 |
| 2110 | RIDPANGNTKYDPKFQG | 40H3.A4 CDR-H2 |
| 2111 | ATLFAY | 40H3.A4 CDR-H3 |
| 2112 | RSSKSLLHSNGITYLY | 40H3.A4 CDR-L1 |
| 2113 | QMSNLAS | 40H3.A4 CDR-L2 |
| 2114 | AQNLELPT | 40H3.A4 CDR-L3 |
| 2115 | GYSITSDYAWN | 42E8.H1 and 49H11.B1 |
| | | CDR-H1 |
| 2116 | YINYSGRTIYNPSLKS | 42E8.H1 CDR-H2 |
| 2117 | ARWNGNYGFAY | 42E8.H1 and 49H11.B1 |
| | | CDR-H3 |
| 2118 | RSSQSLVHINGNTYLH | 42E8.H1 and 49H11.B1 |
| | | CDR-L1 |
| 2119 | SQTTHALFT | 42E8.H1 CDR-L3 |
| 2120 | YISFSGSTSYNPSLKS | 49H11.B1 CDR-H2 |
| 2121 | SQSTHVTFT | 49H11.B1 CDR-L3 |
| 2122 | DSEVFPIAYMS | 54C2.A1 CDR-H1 |
| 2123 | DILPSIGRRIYGVKFED | 54C2.A1 CDR-H2 |
| 2124 | KDYGSLAY | 54C2.A1 CDR-H3 |
| 2125 | SQSTHLPYT | 54C2.A1 CDR-L3 |
| 2126 | GFSLSRYSVY | 57D7.A1 CDR-H1 |
| 2127 | MIWGGGNTDYNSALKS | 57D7.A1 CDR-H2 |
| 2128 | YGGMDY | 57D7.A1 CDR-H3 |
| 2129 | RSSQSIVHSNGNTYLE | 57D7.A1 CDR-L1 |
| 2130 | FQGSHVPYT | 57D7.A1 CDR-L3 |
| 2131 | QVQLQQPGAELVKPGASVKLSCKASGYTFTSYWMHWVKQSPGRGLEWIG | RS9.F6-Fd |
| | RSDPTTGGTNYNEKFKTKATLTVDKPSSTAYMQLSSLTSDDSAVYYCVRT | |
| | SGTGDYWGQGTSLTVSSASTKGPSVFPLAPSSKSTSGGTAALGCLVKDYFP | |
| | EPVTVSWNSGALTSGVHTFPAVLQSSGLYSLSSVVTVPSSSLGTQTYICNV | |
| | NHKPSNTKVDKKVEPKSCDKTH | |
| 2132 | QVQLQQPGAELVKPGASVKLSCKASGYTFTSYWMHWVKQSPGRGLEWIG | RS9.F6-Fd fused to Fc |
| | RSDPTTGGTNYNEKFKTKATLTVDKPSSTAYMQLSSLTSDDSAVYYCVRT | with LALAPG, TfR |
| | SGTGDYWGQGTSLTVSSASTKGPSVFPLAPSSKSTSGGTAALGCLVKDYFP | binding, and knob |
| | EPVTVSWNSGALTSGVHTFPAVLQSSGLYSLSSVVTVPSSSLGTQTYICNV | mutations |
| | NHKPSNTKVDKKVEPKSCDKTHTCPPCPAPEAAGGPSVFLFPPKPKDTLMI | |
| | SRTPEVTCVVVDVSHEDPEVKFNWYVDGVEVHNAKTKPREEQYNSTYRV | |
| | VSVLTVLHQDWLNGKEYKCKVSNKALGAPIEKTISKAKGQPREPQVYTLP | |
| | PSRDELTKNQVSLWCLVKGFYPSDIAVLWESYGTEWASYKTTPPVLDSDG | |
| | SFFLYSKLTVTKEEWQQGFVFSCSVMHEALHNHYTQKSLSLSPGK | |
| 2133 | QVQLQQPGAELVKPGASVKLSCKASGYTFTSYWMHWVKQSPGRGLEWIG | RS9.F6-Fd fused to Fc |
| | RSDPTTGGTNYNEKFKTKATLTVDKPSSTAYMQLSSLTSDDSAVYYCVRT | with LALAPG and |
| | SGTGDYWGQGTSLTVSSASTKGPSVFPLAPSSKSTSGGTAALGCLVKDYFP | hole mutations |
| | EPVTVSWNSGALTSGVHTFPAVLQSSGLYSLSSVVTVPSSSLGTQTYICNV | |
| | NHKPSNTKVDKKVEPKSCDKTHTCPPCPAPEAAGGPSVFLEPPKPKDTLMI | |
| | SRTPEVTCVVVDVSHEDPEVKFNWYVDGVEVHNAKTKPREEQYNSTYRV | |
| | VSVLTVLHQDWLNGKEYKCKVSNKALGAPIEKTISKAKGQPREPQVYTLP | |
| | PSRDELTKNQVSLSCAVKGFYPSDIAVEWESNGQPENNYKTTPPVLDSDGS | |
| | FFLVSKLTVDKSRWQQGNVFSCSVMHEALHNHYTQKSLSLSPGK | |
| 2134 | EVQLQQSGPELVKPGASVKISCKTSGYTLSEYTMHWVIQSHGKSLEWIGG | 3D3.A1-Fd |
| | VIPNSGGTSYNQKFRDKASLTVDKSSSTAYLELRSLTSEDSAVYYCARGDD | |
| | SYRRGYALDYWGQGTSVTVSSASTKGPSVFPLAPSSKSTSGGTAALGCLV | |
| | KDYFPEPVTVSWNSGALTSGVHTFPAVLQSSGLYSLSSVVTVPSSSLGTQT | |
| | YICNVNHKPSNTKVDKKVEPKSCDKTH | |
| 2135 | EVQLQQSGPELVKPGASVKISCKTSGYTLSEYTMHWVIQSHGKSLEWIGG | 3D3.A1-Fd fused to Fc |
| | VIPNSGGTSYNQKFRDKASLTVDKSSSTAYLELRSLTSEDSAVYYCARGDD | with LALAPG, TfR |
| | SYRRGYALDYWGQGTSVTVSSASTKGPSVFPLAPSSKSTSGGTAALGCLV | binding, and knob |
| | KDYFPEPVTVSWNSGALTSGVHTFPAVLQSSGLYSLSSVVTVPSSSLGTQT | mutations |
| | YICNVNHKPSNTKVDKKVEPKSCDKTHTCPPCPAPEAAGGPSVFLFPPKPK | |
| | DTLMISRTPEVTCVVVDVSHEDPEVKFNWYVDGVEVHNAKTKPREEQYN | |
| | STYRVVSVLTVLHQDWLNGKEYKCKVSNKALGAPIEKTISKAKGQPREPQ | |
| | VYTLPPSRDELTKNQVSLWCLVKGFYPSDIAVLWESYGTEWASYKTTPPV | |
| | LDSDGSFFLYSKLTVTKEEWQQGFVFSCSVMHEALHNHYTQKSLSLSPGK | |
| 2136 | EVQLQQSGPELVKPGASVKISCKTSGYTLSEYTMHWVIQSHGKSLEWIGG | 3D3.A1-Fd fused to Fc |
| | VIPNSGGTSYNQKFRDKASLTVDKSSSTAYLELRSLTSEDSAVYYCARGDD | with LALAPG and |
| | SYRRGYALDYWGQGTSVTVSSASTKGPSVFPLAPSSKSTSGGTAALGCLV | hole mutations |
| | KDYFPEPVTVSWNSGALTSGVHTFPAVLQSSGLYSLSSVVTVPSSSLGTQT | |
| | YICNVNHKPSNTKVDKKVEPKSCDKTHTCPPCPAPEAAGGPSVFLFPPKPK | |
| | DTLMISRTPEVTCVVVDVSHEDPEVKFNWYVDGVEVHNAKTKPREEQYN | |
| | STYRVVSVLTVLHQDWLNGKEYKCKVSNKALGAPIEKTISKAKGQPREPQ | |
| | VYTLPPSRDELTKNQVSLSCAVKGFYPSDIAVEWESNGQPENNYKTTPPVL | |
| | DSDGSFDLVSKLTVDKSRWQQGNVDSCSVMHEALHNHYTQKSLSLSPGK | |
| 1 | MEPLRLLILLFVTELSGAHNTTVFQGVAGQSLQVSCPYDSMKH | Human TREM2 protein |
| | WGRRKAWCRQLGEKGPCQRVVSTHNLWLLSFLRRWNGSTAIT | |
| | DDTLGGTLTITLRNLQPHDAGLYQCQSLHGSEADTLRKVLVEVL | |
| | ADPLDHRDAGDLWFPGESESFEDAHVEHSISRSLLEGEIPFPPTSI | |
| | LLLLACIFLIKILAASALWAAAWHGQKPGTHPPSELDCGHDPGY | |
| | QLQTLPGLRDT | |
| 2137 | MMDQARSAFSNLFGGEPLSYTRFSLARQVDGDNSHVEMKLAVDEEENAD | Human transferrin |
| | NNTKANVTKPKRCSGSICYGTIAVIVFFLIGFMIGYLGYCKGVEPKTECERL | receptor protein 1 |
| | AGTESPVREEPGEDFPAARRLYWDDLKRKLSEKLDSTDFTGTIKLLNENSY | (TFR1) |
| | VPREAGSQKDENLALYVENQFREFKLSKVWRDQHFVKIQVKDSAQNSVII | |
| | VDKNGRLVYLVENPGGYVAYSKAATVTGKLVHANFGTKKDFEDLYTPV | |
| | NGSIVIVRAGKITFAEKVANAESLNAIGVLIYMDQTKFPIVNAELSFFGHAH | |
| | LGTGDPYTPGFPSFNHTQFPPSRSSGLPNIPVQTISRAAAEKLFGNMEGDCP | |
| | SDWKTDSTCRMVTSESKNVKLTVSNVLKEIKILNIFGVIKGFVEPDHYVVV | |
| | GAQRDAWGPGAAKSGVGTALLLKLAQMFSDMVLKDGFQPSRSIIFASWS | |
| | AGDEGSVGATEWLEGYLSSLHLKAFTYINLDKAVLGTSNFKVSASPLLYTL | |
| | IEKTMQNVKHPVTGQFLYQDSNWASKVEKLTLDNAAFPFLAYSGIPAVSF | |
| | CFCEDTDYPYLGTTMDTYKELIERIPELNKVARAAAEVAGQFVIKLTHDVE | |
| | LNLDYERYNSQLLSFVRDLNQYRADIKEMGLSLQWLYSARGDFFRATSRL | |
| | TTDFGNAEKTDRFVMKKLNDRVMRVEYHFLSPYVSPKESPFRHVFWGSG | |
| | SHTLPALLENLKLRKQNNGAFNETLFRNQLALATWTIQGAANALSGDVW | |
| | DIDNEF | |
| 2138 | APELLGGPSVFLFPPKPKDTLMISRTPEVTCVVVDVSHEDPEVKFNWYVDG | Wild-type human Fc |
| | VEVHNAKTKPREEQYNSTYRVVSVLTVLHQDWLNGKEYKCKVSNKALP | sequence positions |
| | APIEKTISKAKGQPREPQVYTLPPSRDELTKNQVSLTCLVKGFYPSDIAVEW | 231-447 EU index |
| | ESNGQPENNYKTTPPVLDSDGSFFLYSKLTVDKSRWQQGNVFSCSVMHEA | numbering |
| | LHNHYTQKSLSLSPGK | |
| 2139 | EPKSCDKTHTCPPCP | Human IgG1 hinge |
| 2140 | APELLGGPSVFLFPPKPKDTLMISRTPEVTCVVVDVSHEDPEVKFNWYVDG | sequence Clone |
| | VEVHNAKTKPREEQYNSTYRVVSVLTVLHQDWLNGKEYKCKVSNKALP | CH3C.35.20 |
| | APIEKTISKAKGQPREPQVYTLPPSRDELTKNQVSLTCLVKGFYPSDIAVEW | |
| | ESYGTEWSSYKTTPPVLDSDGSFFLYSKLTVTKEEWQQGFVFSCSVMHEA | |
| | LHNHYTQKSLSLSPGK | |
| 2141 | APELLGGPSVFLFPPKPKDTLMISRTPEVTCVVVDVSHEDPEVKFNWYVDG | Clone CH3C.35.21 |
| | VEVHNAKTKPREEQYNSTYRVVSVLTVLHQDWLNGKEYKCKVSNKALP | |
| | APIEKTISKAKGQPREPQVYTLPPSRDELTKNQVSLTCLVKGFYPSDIAVW | |
| | WESYGTEWSSYKTTPPVLDSDGSFFLYSKLTVTKEEWQQGFVFSCSVMHE | |
| | ALHNHYTQKSLSLSPGK | |
| 2142 | APELLGGPSVFLFPPKPKDTLMISRTPEVTCVVVDVSHEDPEVKFNWYVDG | Clone CH3C.35.22 |
| | VEVHNAKTKPREEQYNSTYRVVSVLTVLHQDWLNGKEYKCKVSNKALP | |
| | APIEKTISKAKGQPREPQVYTLPPSRDELTKNQVSLTCLVKGFYPSDIAVW | |
| | WESYGTEWSNYKTTPPVLDSDGSFFLYSKLTVTKSEWQQGFVFSCSVMHE | |
| | ALHNHYTQKSLSLSPGK | |
| 2143 | APELLGGPSVFLFPPKPKDTLMISRTPEVTCVVVDVSHEDPEVKFNWYVDG | Clone CH3C.35.23 |
| | VEVHNAKTKPREEQYNSTYRVVSVLTVLHQDWLNGKEYKCKVSNKALP | |
| | APIEKTISKAKGQPREPQVYTLPPSRDELTKNQVSLTCLVKGFYPSDIAVEW | |
| | ESYGTEWSNYKTTPPVLDSDGSFFLYSKLTVTKEEWQQGFVFSCSVMHEA | |
| | LHNHYTQKSLSLSPGK | |
| 2144 | APELLGGPSVFLFPPKPKDTLMISRTPEVTCVVVDVSHEDPEVKFNWYVDG | Clone CH3C.35.24 |
| | VEVHNAKTKPREEQYNSTYRVVSVLTVLHQDWLNGKEYKCKVSNKALP | |
| | APIEKTISKAKGQPREPQVYTLPPSRDELTKNQVSLTCLVKGFYPSDIAVW | |
| | WESYGTEWSNYKTTPPVLDSDGSFFLYSKLTVTKEEWQQGFVFSCSVMHE | |
| | ALHNHYTQKSLSLSPGK | |
| 2145 | APELLGGPSVFLFPPKPKDTLMISRTPEVTCVVVDVSHEDPEVKFNWYVDG | Clone CH3C.35.21.17 |
| | VEVHNAKTKPREEQYNSTYRVVSVLTVLHQDWLNGKEYKCKVSNKALP | |
| | APIEKTISKAKGQPREPQVYTLPPSRDELTKNQVSLTCLVKGFYPSDIAVLW | |
| | ESYGTEWSSYKTTPPVLDSDGSFFLYSKLTVTKEEWQQGFVFSCSVMHEA | |
| | LHNHYTQKSLSLSPGK | |
| 2146 | APELLGGPSVFLFPPKPKDTLMISRTPEVTCVVVDVSHEDPEVKFNWYVDG | Clone CH3C.35.20.1 |
| | VEVHNAKTKPREEQYNSTYRVVSVLTVLHQDWLNGKEYKCKVSNKALP | |
| | APIEKTISKAKGQPREPQVYTLPPSRDELTKNQVSLTCLVKGFYPSDIAVEW | |
| | ESFGTEWSSYKTTPPVLDSDGSFFLYSKLTVTKEEWQQGFVFSCSVMHEAL | |
| | HNHYTQKSLSLSPGK | |
| 2147 | APELLGGPSVFLFPPKPKDTLMISRTPEVTCVVVDVSHEDPEVKFNWYVDG | Clone CH3C.35.20.2 |
| | VEVHNAKTKPREEQYNSTYRVVSVLTVLHQDWLNGKEYKCKVSNKALP | |
| | APIEKTISKAKGQPREPQVYTLPPSRDELTKNQVSLTCLVKGFYPSDIAVEW | |
| | ESYGTEWASYKTTPPVLDSDGSFFLYSKLTVTKEEWQQGFVFSCSVMHEA | |
| | LHNHYTQKSLSLSPGK | |
| 2148 | APELLGGPSVFLFPPKPKDTLMISRTPEVTCVVVDVSHEDPEVKFNWYVDG | Clone CH3C.35.20.3 |
| | VEVHNAKTKPREEQYNSTYRVVSVLTVLHQDWLNGKEYKCKVSNKALP | |
| | APIEKTISKAKGQPREPQVYTLPPSRDELTKNQVSLTCLVKGFYPSDIAVEW | |
| | ESYGTEWVSYKTTPPVLDSDGSFFLYSKLTVTKEEWQQGFVFSCSVMHEA | |
| | LHNHYTQKSLSLSPGK | |
| 2149 | APELLGGPSVFLFPPKPKDTLMISRTPEVTCVVVDVSHEDPEVKFNWYVDG | Clone CH3C.35.20.4 |
| | VEVHNAKTKPREEQYNSTYRVVSVLTVLHQDWLNGKEYKCKVSNKALP | |
| | APIEKTISKAKGQPREPQVYTLPPSRDELTKNQVSLTCLVKGFYPSDIAVEW | |
| | ESYGTEWSSYKTTPPVLDSDGSFFLYSKLTVSKEEWQQGFVFSCSVMHEA | |
| | LHNHYTQKSLSLSPGK | |
| 2150 | APELLGGPSVFLFPPKPKDTLMISRTPEVTCVVVDVSHEDPEVKFNWYVDG | Clone CH3C.35.20.5 |
| | VEVHNAKTKPREEQYNSTYRVVSVLTVLHQDWLNGKEYKCKVSNKALP | |
| | APIEKTISKAKGQPREPQVYTLPPSRDELTKNQVSLTCLVKGFYPSDIAVEW | |
| | ESFGTEWASYKTTPPVLDSDGSFFLYSKLTVTKEEWQQGFVFSCSVMHEA | |
| | LHNHYTQKSLSLSPGK | |
| 2151 | APELLGGPSVFLFPPKPKDTLMISRTPEVTCVVVDVSHEDPEVKFNWYVDG | Clone CH3C.35.20.6 |
| | VEVHNAKTKPREEQYNSTYRVVSVLTVLHQDWLNGKEYKCKVSNKALP | |
| | APIEKTISKAKGQPREPQVYTLPPSRDELTKNQVSLTCLVKGFYPSDIAVEW | |
| | ESFGTEWVSYKTTPPVLDSDGSFFLYSKLTVTKEEWQQGFVFSCSVMHEA | |
| | LHNHYTQKSLSLSPGK | |
| 2152 | APELLGGPSVFLFPPKPKDTLMISRTPEVTCVVVDVSHEDPEVKFNWYVDG | Clone CH3C.35.21.a.1 |
| | VEVHNAKTKPREEQYNSTYRVVSVLTVLHQDWLNGKEYKCKVSNKALP | |
| | APIEKTISKAKGQPREPQVYTLPPSRDELTKNQVSLTCLVKGFYPSDIAVW | |
| | WESFGTEWSSYKTTPPVLDSDGSFFLYSKLTVTKEEWQQGFVFSCSVMHE | |
| | ALHNHYTQKSLSLSPGK | |
| 2153 | APELLGGPSVFLFPPKPKDTLMISRTPEVTCVVVDVSHEDPEVKFNWYVDG | Clone CH3C.35.21.a.2 |
| | VEVHNAKTKPREEQYNSTYRVVSVLTVLHQDWLNGKEYKCKVSNKALP | |
| | APIEKTISKAKGQPREPQVYTLPPSRDELTKNQVSLTCLVKGFYPSDIAVW | |
| | WESYGTEWASYKTTPPVLDSDGSFFLYSKLTVTKEEWQQGFVFSCSVMHE | |
| | ALHNHYTQKSLSLSPGK | |
| 2154 | APELLGGPSVFLFPPKPKDTLMISRTPEVTCVVVDVSHEDPEVKFNWYVDG | Clone CH3C.35.21.a.3 |
| | VEVHNAKTKPREEQYNSTYRVVSVLTVLHQDWLNGKEYKCKVSNKALP | |
| | APIEKTISKAKGQPREPQVYTLPPSRDELTKNQVSLTCLVKGFYPSDIAVW | |
| | WESYGTEWVSYKTTPPVLDSDGSFFLYSKLTVTKEEWQQGFVFSCSVMHE | |
| | ALHNHYTQKSLSLSPGK | |
| 2155 | APELLGGPSVFLFPPKPKDTLMISRTPEVTCVVVDVSHEDPEVKFNWYVDG | Clone CH3C.35.21.a.4 |
| | VEVHNAKTKPREEQYNSTYRVVSVLTVLHQDWLNGKEYKCKVSNKALP | |
| | APIEKTISKAKGQPREPQVYTLPPSRDELTKNQVSLTCLVKGFYPSDIAVW | |
| | WESYGTEWSSYKTTPPVLDSDGSFFLYSKLTVSKEEWQQGFVFSCSVMHE | |
| | ALHNHYTQKSLSLSPGK | |
| 2156 | APELLGGPSVFLFPPKPKDTLMISRTPEVTCVVVDVSHEDPEVKFNWYVDG | Clone CH3C.35.21.a.5 |
| | VEVHNAKTKPREEQYNSTYRVVSVLTVLHQDWLNGKEYKCKVSNKALP | |
| | APIEKTISKAKGQPREPQVYTLPPSRDELTKNQVSLTCLVKGFYPSDIAVW | |
| | WESFGTEWASYKTTPPVLDSDGSFFLYSKLTVTKEEWQQGFVFSCSVMHE | |
| | ALHNHYTQKSLSLSPGK | |
| 2157 | APELLGGPSVFLFPPKPKDTLMISRTPEVTCVVVDVSHEDPEVKFNWYVDG | Clone CH3C.35.21.a.6 |
| | VEVHNAKTKPREEQYNSTYRVVSVLTVLHQDWLNGKEYKCKVSNKALP | |
| | APIEKTISKAKGQPREPQVYTLPPSRDELTKNQVSLTCLVKGFYPSDIAVW | |
| | WESFGTEWVSYKTTPPVLDSDGSFFLYSKLTVTKEEWQQGFVFSCSVMHE | |
| | ALHNHYTQKSLSLSPGK | |
| 2158 | APELLGGPSVFLFPPKPKDTLMISRTPEVTCVVVDVSHEDPEVKFNWYVDG | Clone CH3C.35.23.1 |
| | VEVHNAKTKPREEQYNSTYRVVSVLTVLHQDWLNGKEYKCKVSNKALP | |
| | APIEKTISKAKGQPREPQVYTLPPSRDELTKNQVSLTCLVKGFYPSDIAVEW | |
| | ESFGTEWSNYKTTPPVLDSDGSFFLYSKLTVTKEEWQQGFVFSCSVMHEA | |
| | LHNHYTQKSLSLSPGK | |
| 2159 | APELLGGPSVFLFPPKPKDTLMISRTPEVTCVVVDVSHEDPEVKFNWYVDG | Clone CH3C.35.23.2 |
| | VEVHNAKTKPREEQYNSTYRVVSVLTVLHQDWLNGKEYKCKVSNKALP | |
| | APIEKTISKAKGQPREPQVYTLPPSRDELTKNQVSLTCLVKGFYPSDIAVEW | |
| | ESYGTEWANYKTTPPVLDSDGSFFLYSKLTVTKEEWQQGFVFSCSVMHEA | |
| | LHNHYTQKSLSLSPGK | |
| 2160 | APELLGGPSVFLFPPKPKDTLMISRTPEVTCVVVDVSHEDPEVKFNWYVDG | Clone CH3C.35.23.3 |
| | VEVHNAKTKPREEQYNSTYRVVSVLTVLHQDWLNGKEYKCKVSNKALP | |
| | APIEKTISKAKGQPREPQVYTLPPSRDELTKNQVSLTCLVKGFYPSDIAVEW | |
| | ESYGTEWVNYKTTPPVLDSDGSFFLYSKLTVTKEEWQQGFVFSCSVMHEA | |
| | LHNHYTQKSLSLSPGK | |
| 2161 | APELLGGPSVFLFPPKPKDTLMISRTPEVTCVVVDVSHEDPEVKFNWYVDG | Clone CH3C.35.23.4 |
| | VEVHNAKTKPREEQYNSTYRVVSVLTVLHQDWLNGKEYKCKVSNKALP | |
| | APIEKTISKAKGQPREPQVYTLPPSRDELTKNQVSLTCLVKGFYPSDIAVEW | |
| | ESYGTEWSNYKTTPPVLDSDGSFFLYSKLTVSKEEWQQGFVFSCSVMHEA | |
| | LHNHYTQKSLSLSPGK | |
| 2162 | APELLGGPSVFLFPPKPKDTLMISRTPEVTCVVVDVSHEDPEVKFNWYVDG | Clone CH3C.35.23.5 |
| | VEVHNAKTKPREEQYNSTYRVVSVLTVLHQDWLNGKEYKCKVSNKALP | |
| | APIEKTISKAKGQPREPQVYTLPPSRDELTKNQVSLTCLVKGFYPSDIAVEW | |
| | ESFGTEWANYKTTPPVLDSDGSFFLYSKLTVTKEEWQQGFVFSCSVMHEA | |
| | LHNHYTQKSLSLSPGK | |
| 2163 | APELLGGPSVFLFPPKPKDTLMISRTPEVTCVVVDVSHEDPEVKFNWYVDG | Clone CH3C.35.23.6 |
| | VEVHNAKTKPREEQYNSTYRVVSVLTVLHQDWLNGKEYKCKVSNKALP | |
| | APIEKTISKAKGQPREPQVYTLPPSRDELTKNQVSLTCLVKGFYPSDIAVEW | |
| | ESFGTEWVNYKTTPPVLDSDGSFFLYSKLTVTKEEWQQGFVFSCSVMHEA | |
| | LHNHYTQKSLSLSPGK | |
| 2164 | APELLGGPSVFLFPPKPKDTLMISRTPEVTCVVVDVSHEDPEVKFNWYVDG | Clone CH3C.35.24.1 |
| | VEVHNAKTKPREEQYNSTYRVVSVLTVLHQDWLNGKEYKCKVSNKALP | |
| | APIEKTISKAKGQPREPQVYTLPPSRDELTKNQVSLTCLVKGFYPSDIAVW | |
| | WESFGTEWSNYKTTPPVLDSDGSFFLYSKLTVTKEEWQQGFVFSCSVMHE | |
| | ALHNHYTQKSLSLSPGK | |
| 2165 | APELLGGPSVFLFPPKPKDTLMISRTPEVTCVVVDVSHEDPEVKFNWYVDG | Clone CH3C.35.24.2 |
| | VEVHNAKTKPREEQYNSTYRVVSVLTVLHQDWLNGKEYKCKVSNKALP | |
| | APIEKTISKAKGQPREPQVYTLPPSRDELTKNQVSLTCLVKGFYPSDIAVW | |
| | WESYGTEWANYKTTPPVLDSDGSFFLYSKLTVTKEEWQQGFVFSCSVMH | |
| | EALHNHYTQKSLSLSPGK | |
| 2166 | APELLGGPSVFLFPPKPKDTLMISRTPEVTCVVVDVSHEDPEVKFNWYVDG | Clone CH3C.35.24.3 |
| | VEVHNAKTKPREEQYNSTYRVVSVLTVLHQDWLNGKEYKCKVSNKALP | |
| | APIEKTISKAKGQPREPQVYTLPPSRDELTKNQVSLTCLVKGFYPSDIAVW | |
| | WESYGTEWVNYKTTPPVLDSDGSFFLYSKLTVTKEEWQQGFVFSCSVMH | |
| | EALHNHYTQKSLSLSPGK | |
| 2167 | APELLGGPSVFLFPPKPKDTLMISRTPEVTCVVVDVSHEDPEVKFNWYVDG | Clone CH3C.35.24.4 |
| | VEVHNAKTKPREEQYNSTYRVVSVLTVLHQDWLNGKEYKCKVSNKALP | |
| | APIEKTISKAKGQPREPQVYTLPPSRDELTKNQVSLTCLVKGFYPSDIAVW | |
| | WESYGTEWSNYKTTPPVLDSDGSFFLYSKLTVSKEEWQQGFVFSCSVMHE | |
| | ALHNHYTQKSLSLSPGK | |
| 2168 | APELLGGPSVFLFPPKPKDTLMISRTPEVTCVVVDVSHEDPEVKFNWYVDG | Clone CH3C.35.24.5 |
| | VEVHNAKTKPREEQYNSTYRVVSVLTVLHQDWLNGKEYKCKVSNKALP | |
| | APIEKTISKAKGQPREPQVYTLPPSRDELTKNQVSLTCLVKGFYPSDIAVW | |
| | WESFGTEWANYKTTPPVLDSDGSFFLYSKLTVTKEEWQQGFVFSCSVMHE | |
| | ALHNHYTQKSLSLSPGK | |
| 2169 | APELLGGPSVFLFPPKPKDTLMISRTPEVTCVVVDVSHEDPEVKFNWYVDG | Clone CH3C.35.24.6 |
| | VEVHNAKTKPREEQYNSTYRVVSVLTVLHQDWLNGKEYKCKVSNKALP | |
| | APIEKTISKAKGQPREPQVYTLPPSRDELTKNQVSLTCLVKGFYPSDIAVW | |
| | WESFGTEWVNYKTTPPVLDSDGSFFLYSKLTVTKEEWQQGFVFSCSVMHE | |
| | ALHNHYTQKSLSLSPGK | |
| 2170 | APELLGGPSVFLFPPKPKDTLMISRTPEVTCVVVDVSHEDPEVKFNWYVDG | Clone CH3C.35.21.17.1 |
| | VEVHNAKTKPREEQYNSTYRVVSVLTVLHQDWLNGKEYKCKVSNKALP | |
| | APIEKTISKAKGQPREPQVYTLPPSRDELTKNQVSLTCLVKGFYPSDIAVLW | |
| | ESFGTEWSSYKTTPPVLDSDGSFFLYSKLTVTKEEWQQGFVFSCSVMHEAL | |
| | HNHYTQKSLSLSPGK | |
| 2171 | APELLGGPSVFLFPPKPKDTLMISRTPEVTCVVVDVSHEDPEVKFNWYVDG | Clone CH3C.35.21.17.2 |
| | VEVHNAKTKPREEQYNSTYRVVSVLTVLHQDWLNGKEYKCKVSNKALP | |
| | APIEKTISKAKGQPREPQVYTLPPSRDELTKNQVSLTCLVKGFYPSDIAVLW | |
| | ESYGTEWASYKTTPPVLDSDGSFFLYSKLTVTKEEWQQGFVFSCSVMHEA | |
| | LHNHYTQKSLSLSPGK | |
| 2172 | APELLGGPSVFLFPPKPKDTLMISRTPEVTCVVVDVSHEDPEVKFNWYVDG | Clone CH3C.35.21.17.3 |
| | VEVHNAKTKPREEQYNSTYRVVSVLTVLHQDWLNGKEYKCKVSNKALP | |
| | APIEKTISKAKGQPREPQVYTLPPSRDELTKNQVSLTCLVKGFYPSDIAVLW | |
| | ESYGTEWVSYKTTPPVLDSDGSFFLYSKLTVTKEEWQQGFVFSCSVMHEA | |
| | LHNHYTQKSLSLSPGK | |
| 2173 | APELLGGPSVFLFPPKPKDTLMISRTPEVTCVVVDVSHEDPEVKFNWYVDG | Clone CH3C.35.21.17.4 |
| | VEVHNAKTKPREEQYNSTYRVVSVLTVLHQDWLNGKEYKCKVSNKALP | |
| | APIEKTISKAKGQPREPQVYTLPPSRDELTKNQVSLTCLVKGFYPSDIAVLW | |
| | ESYGTEWSSYKTTPPVLDSDGSFFLYSKLTVSKEEWQQGFVFSCSVMHEA | |
| | LHNHYTQKSLSLSPGK | |
| 2174 | APELLGGPSVFLFPPKPKDTLMISRTPEVTCVVVDVSHEDPEVKFNWYVDG | Clone CH3C.35.21.17.5 |
| | VEVHNAKTKPREEQYNSTYRVVSVLTVLHQDWLNGKEYKCKVSNKALP | |
| | APIEKTISKAKGQPREPQVYTLPPSRDELTKNQVSLTCLVKGFYPSDIAVLW | |
| | ESFGTEWASYKTTPPVLDSDGSFFLYSKLTVTKEEWQQGFVFSCSVMHEA | |
| | LHNHYTQKSLSLSPGK | |
| 2175 | APELLGGPSVFLFPPKPKDTLMISRTPEVTCVVVDVSHEDPEVKFNWYVDG | Clone CH3C.35.21.17.6 |
| | VEVHNAKTKPREEQYNSTYRVVSVLTVLHQDWLNGKEYKCKVSNKALP | |
| | APIEKTISKAKGQPREPQVYTLPPSRDELTKNQVSLTCLVKGFYPSDIAVLW | |
| | ESFGTEWVSYKTTPPVLDSDGSFFLYSKLTVTKEEWQQGFVFSCSVMHEA | |
| | LHNHYTQKSLSLSPGK | |
| 2176 | APELLGGPSVFLFPPKPKDTLMISRTPEVTCVVVDVSHEDPEVKFNWYVDG | Clones CH3C.35.N390 and |
| | VEVHNAKTKPREEQYNSTYRVVSVLTVLHQDWLNGKEYKCKVSNKALP | CH3C.35.N163 |
| | APIEKTISKAKGQPREPQVYTLPPSRDELTKNQVSLTCLVKGFYPSDIAVEW | |
| | ESYGTEWSNYKTTPPVLDSDGSFFLYSKLTVTKSEWQQGFVFSCSVMHEA | |
| | LHNHYTQKSLSLSPGK | |
| 2177 | APELLGGPSVFLFPPKPKDTLMISRTPEVTCVVVDVSHEDPEVKFNWYVDG | Clone CH3C.1 |
| | VEVHNAKTKPREEQYNSTYRVVSVLTVLHQDWLNGKEYKCKVSNKALP | |
| | APIEKTISKAKGQPREPQVYTLPPSRDELTKNQVSLTCLVKGFYPSDIAVEW | |
| | ESLGLVWVGYKTTPPVLDSDGSFFLYSKLTVAKSTWQQGWVFSCSVMHE | |
| | ALHNHYTQKSLSLSPGK | |
| 2178 | APELLGGPSVFLFPPKPKDTLMISRTPEVTCVVVDVSHEDPEVKFNWYVDG | Clone CH3C.2 |
| | VEVHNAKTKPREEQYNSTYRVVSVLTVLHQDWLNGKEYKCKVSNKALP | |
| | APIEKTISKAKGQPREPQVYTLPPSRDELTKNQVSLTCLVKGFYPSDIAVEW | |
| | ESYGTVWSHYKTTPPVLDSDGSFFLYSKLTVSKSEWQQGYVFSCSVMHEA | |
| | LHNHYTQKSLSLSPGK | |
| 2179 | APELLGGPSVFLFPPKPKDTLMISRTPEVTCVVVDVSHEDPEVKFNWYVDG | Clone CH3C.3 |
| | VEVHNAKTKPREEQYNSTYRVVSVLTVLHQDWLNGKEYKCKVSNKALP | |
| | APIEKTISKAKGQPREPQVYTLPPSRDELTKNQVSLTCLVKGFYPSDIAVEW | |
| | ESYGTEWSQYKTTPPVLDSDGSFFLYSKLTVEKSDWQQGHVFSCSVMHEA | |
| | LHNHYTQKSLSLSPGK | |
| 2180 | APELLGGPSVFLFPPKPKDTLMISRTPEVTCVVVDVSHEDPEVKFNWYVDG | Clone CH3C.4 |
| | VEVHNAKTKPREEQYNSTYRVVSVLTVLHQDWLNGKEYKCKVSNKALP | |
| | APIEKTISKAKGQPREPQVYTLPPSRDELTKNQVSLTCLVKGFYPSDIAVEW | |
| | ESVGTPWALYKTTPPVLDSDGSFFLYSKLTVLKSEWQQGWVFSCSVMHE | |
| | ALHNHYTQKSLSLSPGK | |
| 2181 | APELLGGPSVFLFPPKPKDTLMISRTPEVTCVVVDVSHEDPEVKFNWYVDG | Clone CH3C.17 |
| | VEVHNAKTKPREEQYNSTYRVVSVLTVLHQDWLNGKEYKCKVSNKALP | |
| | APIEKTISKAKGQPREPQVYTLPPSRDELTKNQVSLTCLVKGFYPSDIAVEW | |
| | ESYGTVWSKYKTTPPVLDSDGSFFLYSKLTVSKSEWQQGFVFSCSVMHEA | |
| | LHNHYTQKSLSLSPGK | |
| 2182 | APELLGGPSVFLFPPKPKDTLMISRTPEVTCVVVDVSHEDPEVKFNWYVDG | Clone CH3C.18 |
| | VEVHNAKTKPREEQYNSTYRVVSVLTVLHQDWLNGKEYKCKVSNKALP | |
| | APIEKTISKAKGQPREPQVYTLPPSRDELTKNQVSLTCLVKGFYPSDIAVEW | |
| | ESLGHVWAVYKTTPPVLDSDGSFFLYSKLTVPKSTWQQGWVFSCSVMHE | |
| | ALHNHYTQKSLSLSPGK | |
| 2183 | APELLGGPSVFLFPPKPKDTLMISRTPEVTCVVVDVSHEDPEVKFNWYVDG | Clone CH3C.21 |
| | VEVHNAKTKPREEQYNSTYRVVSVLTVLHQDWLNGKEYKCKVSNKALP | |
| | APIEKTISKAKGQPREPQVYTLPPSRDELTKNQVSLTCLVKGFYPSDIAVEW | |
| | ESLGLVWVGYKTTPPVLDSDGSFFLYSKLTVPKSTWQQGWVFSCSVMHE | |
| | ALHNHYTQKSLSLSPGK | |
| 2184 | APELLGGPSVFLFPPKPKDTLMISRTPEVTCVVVDVSHEDPEVKFNWYVDG | Clone CH3C.25 |
| | VEVHNAKTKPREEQYNSTYRVVSVLTVLHQDWLNGKEYKCKVSNKALP | |
| | APIEKTISKAKGQPREPQVYTLPPSRDELTKNQVSLTCLVKGFYPSDIAVEW | |
| | ESMGHVWVGYKTTPPVLDSDGSFFLYSKLTVDKSTWQQGWVFSCSVMHE | |
| | ALHNHYTQKSLSLSPGK | |
| 2185 | APELLGGPSVFLFPPKPKDTLMISRTPEVTCVVVDVSHEDPEVKFNWYVDG | Clone CH3C.34 |
| | VEVHNAKTKPREEQYNSTYRVVSVLTVLHQDWLNGKEYKCKVSNKALP | |
| | APIEKTISKAKGQPREPQVYTLPPSRDELTKNQVSLTCLVKGFYPSDIAVEW | |
| | ESLGLVWVFSKTTPPVLDSDGSFFLYSKLTVPKSTWQQGWVFSCSVMHEA | |
| | LHNHYTQKSLSLSPGK | |
| 2186 | APELLGGPSVFLFPPKPKDTLMISRTPEVTCVVVDVSHEDPEVKFNWYVDG | Clone CH3C.35 |
| | VEVHNAKTKPREEQYNSTYRVVSVLTVLHQDWLNGKEYKCKVSNKALP | |
| | APIEKTISKAKGQPREPQVYTLPPSRDELTKNQVSLTCLVKGFYPSDIAVEW | |
| | ESYGTEWSSYKTTPPVLDSDGSFFLYSKLTVTKSEWQQGFVFSCSVMHEA | |
| | LHNHYTQKSLSLSPGK | |
| 2187 | APELLGGPSVFLFPPKPKDTLMISRTPEVTCVVVDVSHEDPEVKFNWYVDG | Clone CH3C.44 |
| | VEVHNAKTKPREEQYNSTYRVVSVLTVLHQDWLNGKEYKCKVSNKALP | |
| | APIEKTISKAKGQPREPQVYTLPPSRDELTKNQVSLTCLVKGFYPSDIAVEW | |
| | ESYGTEWSNYKTTPPVLDSDGSFFLYSKLTVSKSEWQQGFVFSCSVMHEA | |
| | LHNHYTQKSLSLSPGK | |
| 2188 | APELLGGPSVFLFPPKPKDTLMISRTPEVTCVVVDVSHEDPEVKFNWYVDG | Clone CH3C.51 |
| | VEVHNAKTKPREEQYNSTYRVVSVLTVLHQDWLNGKEYKCKVSNKALP | |
| | APIEKTISKAKGQPREPQVYTLPPSRDELTKNQVSLTCLVKGFYPSDIAVEW | |
| | ESLGHVWVGYKTTPPVLDSDGSFFLYSKLTVSKSEWQQGWVFSCSVMHE | |
| | ALHNHYTQKSLSLSPGK | |
| 2189 | APELLGGPSVFLFPPKPKDTLMISRTPEVTCVVVDVSHEDPEVKFNWYVDG | Clone CH3C.3.1-3 |
| | VEVHNAKTKPREEQYNSTYRVVSVLTVLHQDWLNGKEYKCKVSNKALP | |
| | APIEKTISKAKGQPREPQVYTLPPSRDELTKNQVSLTCLVKGFYPSDIAVEW | |
| | ESLGHVWVATKTTPPVLDSDGSFFLYSKLTVPKSTWQQGWVFSCSVMHE | |
| | ALHNHYTQKSLSLSPGK | |
| 2190 | APELLGGPSVFLFPPKPKDTLMISRTPEVTCVVVDVSHEDPEVKFNWYVDG | Clone CH3C.3.1-9 |
| | VEVHNAKTKPREEQYNSTYRVVSVLTVLHQDWLNGKEYKCKVSNKALP | |
| | APIEKTISKAKGQPREPQVYTLPPSRDELTKNQVSLTCLVKGFYPSDIAVEW | |
| | ESLGPVWVHTKTTPPVLDSDGSFFLYSKLTVPKSTWQQGWVFSCSVMHEA | |
| | LHNHYTQKSLSLSPGK | |
| 2191 | APELLGGPSVFLFPPKPKDTLMISRTPEVTCVVVDVSHEDPEVKFNWYVDG | Clone CH3C.32-5 |
| | VEVHNAKTKPREEQYNSTYRVVSVLTVLHQDWLNGKEYKCKVSNKALP | |
| | APIEKTISKAKGQPREPQVYTLPPSRDELTKNQVSLTCLVKGFYPSDIAVEW | |
| | ESLGHVWVDQKTTPPVLDSDGSFFLYSKLTVPKSTWQQGWVFSCSVMHE | |
| | ALHNHYTQKSLSLSPGK | |
| 2192 | APELLGGPSVFLFPPKPKDTLMISRTPEVTCVVVDVSHEDPEVKFNWYVDG | Clone CH3C.3.2-19 |
| | VEVHNAKTKPREEQYNSTYRVVSVLTVLHQDWLNGKEYKCKVSNKALP | |
| | APIEKTISKAKGQPREPQVYTLPPSRDELTKNQVSLTCLVKGFYPSDIAVEW | |
| | ESLGHVWVNQKTTPPVLDSDGSFFLYSKLTVPKSTWQQGWVFSCSVMHE | |
| | ALHNHYTQKSLSLSPGK | |
| 2193 | APELLGGPSVFLFPPKPKDTLMISRTPEVTCVVVDVSHEDPEVKFNWYVDG | Clone CH3C.3.2-1 |
| | VEVHNAKTKPREEQYNSTYRVVSVLTVLHQDWLNGKEYKCKVSNKALP | |
| | APIEKTISKAKGQPREPQVYTLPPSRDELTKNQVSLTCLVKGFYPSDIAVEW | |
| | ESLGHVWVNFKTTPPVLDSDGSFFLYSKLTVPKSTWQQGWVFSCSVMHE | |
| | ALHNHYTQKSLSLSPGK | |
| 2194 | APELLGGPSVFLFPPKPKDTLMISRTPEVTCVVVDVSHEDPEVKFNWYVDG | Clone CH3C.18 variant |
| | VEVHNAKTKPREEQYNSTYRVVSVLTVLHQDWLNGKEYKCKVSNKALP | |
| | APIEKTISKAKGQPREPQVYTLPPSRDELTKNQVSLTCLVKGFYPSDIAVW | |
| | WESLGHVWAVYKTTPPVLDSDGSFFLYSKLTVPKSTWQQGWVFSCSVMH | |
| | EALHNHYTQKSLSLSPGK | |
| 2195 | APELLGGPSVFLFPPKPKDTLMISRTPEVTCVVVDVSHEDPEVKFNWYVDG | Clone CH3C.18 variant |
| | VEVHNAKTKPREEQYNSTYRVVSVLTVLHQDWLNGKEYKCKVSNKALP | |
| | APIEKTISKAKGQPREPQVYTLPPSRDELTKNQVSLTCLVKGFYPSDIAVLW | |
| | ESLGHVWAVYKTTPPVLDSDGSFFLYSKLTVPKSTWQQGWVFSCSVMHE | |
| | ALHNHYTQKSLSLSPGK | |
| 2196 | APELLGGPSVFLFPPKPKDTLMISRTPEVTCVVVDVSHEDPEVKFNWYVDG | Clone CH3C.18 variant |
| | VEVHNAKTKPREEQYNSTYRVVSVLTVLHQDWLNGKEYKCKVSNKALP | |
| | APIEKTISKAKGQPREPQVYTLPPSRDELTKNQVSLTCLVKGFYPSDIAVY | |
| | WESLGHVWAVYKTTPPVLDSDGSFFLYSKLTVPKSTWQQGWVFSCSVMH | |
| | EALHNHYTQKSLSLSPGK | |
| 2197 | APELLGGPSVFLFPPKPKDTLMISRTPEVTCVVVDVSHEDPEVKFNWYVDG | Clone CH3C.18 variant |
| | VEVHNAKTKPREEQYNSTYRVVSVLTVLHQDWLNGKEYKCKVSNKALP | |
| | APIEKTISKAKGQPREPQVYTLPPSRDELTKNQVSLTCLVKGFYPSDIAVEW | |
| | ESLGHVWAVYQTTPPVLDSDGSFFLYSKLTVPKSTWQQGWVFSCSVMHE | |
| | ALHNHYTQKSLSLSPGK | |
| 2198 | APELLGGPSVFLFPPKPKDTLMISRTPEVTCVVVDVSHEDPEVKFNWYVDG | Clone CH3C.18 variant |
| | VEVHNAKTKPREEQYNSTYRVVSVLTVLHQDWLNGKEYKCKVSNKALP | |
| | APIEKTISKAKGQPREPQVYTLPPSRDELTKNQVSLTCLVKGFYPSDIAVEW | |
| | ESLGHVWAVYFTTPPVLDSDGSFFLYSKLTVPKSTWQQGWVFSCSVMHE | |
| | ALHNHYTQKSLSLSPGK | |
| 2199 | APELLGGPSVFLFPPKPKDTLMISRTPEVTCVVVDVSHEDPEVKFNWYVDG | Clone CH3C.18 variant |
| | VEVHNAKTKPREEQYNSTYRVVSVLTVLHQDWLNGKEYKCKVSNKALP | |
| | APIEKTISKAKGQPREPQVYTLPPSRDELTKNQVSLTCLVKGFYPSDIAVEW | |
| | ESLGHVWAVYHTTPPVLDSDGSFFLYSKLTVPKSTWQQGWVFSCSVMHE | |
| | ALHNHYTQKSLSLSPGK | |
| 2200 | APELLGGPSVFLFPPKPKDTLMISRTPEVTCVVVDVSHEDPEVKFNWYVDG | Clone CH3C.35.13 |
| | VEVHNAKTKPREEQYNSTYRVVSVLTVLHQDWLNGKEYKCKVSNKALP | |
| | APIEKTISKAKGQPREPQVYTLPPSRDELTKNQVSLTCLVKGFYPSDIAVW | |
| | WESLGHVWAVYKTTPPVLDSDGSFFLYSKLTVPKSTWQQGWVFSCSVMH | |
| | EALHNHYTQKSLSLSPGK | |
| 2201 | APELLGGPSVFLFPPKPKDTLMISRTPEVTCVVVDVSHEDPEVKFNWYVDG | Clone CH3C.35.14 |
| | VEVHNAKTKPREEQYNSTYRVVSVLTVLHQDWLNGKEYKCKVSNKALP | |
| | APIEKTISKAKGQPREPQVYTLPPSRDELTKNQVSLTCLVKGFYPSDIAVEW | |
| | ESLGHVWAVYQTTPPVLDSDGSFFLYSKLTVPKSTWQQGWVFSCSVMHE | |
| | ALHNHYTQKSLSLSPGK | |
| 2202 | APELLGGPSVFLFPPKPKDTLMISRTPEVTCVVVDVSHEDPEVKFNWYVDG | Clone CH3C.35.15 |
| | VEVHNAKTKPREEQYNSTYRVVSVLTVLHQDWLNGKEYKCKVSNKALP | |
| | APIEKTISKAKGQPREPQVYTLPPSRDELTKNQVSLTCLVKGFYPSDIAVW | |
| | WESLGHVWAVYQTTPPVLDSDGSFFLYSKLTVPKSTWQQGWVFSCSVMH | |
| | EALHNHYTQKSLSLSPGK | |
| 2203 | APELLGGPSVFLFPPKPKDTLMISRTPEVTCVVVDVSHEDPEVKFNWYVDG | Clone CH3C.35.16 |
| | VEVHNAKTKPREEQYNSTYRVVSVLTVLHQDWLNGKEYKCKVSNKALP | |
| | APIEKTISKAKGQPREPQVYTLPPSRDELTKNQVSLTCLVKGFYPSDIAVW | |
| | WESLGHVWVNQKTTPPVLDSDGSFFLYSKLTVPKSTWQQGWVFSCSVMH | |
| | EALHNHYTQKSLSLSPGK | |
| 2204 | APELLGGPSVFLFPPKPKDTLMISRTPEVTCVVVDVSHEDPEVKFNWYVDG | Clone CH3C.35.17 |
| | VEVHNAKTKPREEQYNSTYRVVSVLTVLHQDWLNGKEYKCKVSNKALP | |
| | APIEKTISKAKGQPREPQVYTLPPSRDELTKNQVSLTCLVKGFYPSDIAVEW | |
| | ESLGHVWVNQQTTPPVLDSDGSFFLYSKLTVPKSTWQQGWVFSCSVMHE | |
| | ALHNHYTQKSLSLSPGK | |
| 2205 | APELLGGPSVFLFPPKPKDTLMISRTPEVTCVVVDVSHEDPEVKFNWYVDG | Clone CH3C.35.18 |
| | VEVHNAKTKPREEQYNSTYRVVSVLTVLHQDWLNGKEYKCKVSNKALP | |
| | APIEKTISKAKGQPREPQVYTLPPSRDELTKNQVSLTCLVKGFYPSDIAVW | |
| | WESLGHVWVNQQTTPPVLDSDGSFFLYSKLTVPKSTWQQGWVFSCSVMH | |
| | EALHNHYTQKSLSLSPGK | |
| 2206 | APELLGGPSVFLFPPKPKDTLMISRTPEVTCVVVDVSHEDPEVKFNWYVDG | Clone CH3C.35.19 |
| | VEVHNAKTKPREEQYNSTYRVVSVLTVLHQDWLNGKEYKCKVSNKALP | |
| | APIEKTISKAKGQPREPQVYTLPPSRDELTKNQVSLTCLVKGFYPSDIAVW | |
| | WESYGTEWSSYKTTPPVLDSDGSFFLYSKLTVTKSEWQQGFVFSCSVMHE | |
| | ALHNHYTQKSLSLSPGK | |
| 2207 | APELLGGPSVFLFPPKPKDTLMISRTPEVTCVVVDVSHEDPEVKFNWYVDG | Clone CH3C.35.K165Q |
| | VEVHNAKTKPREEQYNSTYRVVSVLTVLHQDWLNGKEYKCKVSNKALP | |
| | APIEKTISKAKGQPREPQVYTLPPSRDELTKNQVSLTCLVKGFYPSDIAVEW | |
| | ESYGTEWSSYQTTPPVLDSDGSFFLYSKLTVTKSEWQQGFVFSCSVMHEA | |
| | LHNHYTQKSLSLSPGK | |
| 2208 | APELLGGPSVFLFPPKPKDTLMISRTPEVTCVVVDVSHEDPEVKFNWYVDG | Clone |
| | VEVHNAKTKPREEQYNSTYRVVSVLTVLHQDWLNGKEYKCKVSNKALP | CH3C.35.N163.K165Q |
| | APIEKTISKAKGQPREPQVYTLPPSRDELTKNQVSLTCLVKGFYPSDIAVEW | |
| | ESYGTEWSNYQTTPPVLDSDGSFFLYSKLTVTKSEWQQGFVFSCSVMHEA | |
| | LHNHYTQKSLSLSPGK | |
| 2209 | APELLGGPSVFLFPPKPKDTLMISRTPEVTCVVVDVSHEDPEVKFNWYVDG | Clone CH3C.35.21.1 |
| | VEVHNAKTKPREEQYNSTYRVVSVLTVLHQDWLNGKEYKCKVSNKALP | |
| | APIEKTISKAKGQPREPQVYTLPPSRDELTKNQVSLTCLVKGFYPSDIAVLW | |
| | ESYGTEWSSYKTTPPVLDSDGSFFLYSKLTVTKSEWQQGFVFSCSVMHEA | |
| | LHNHYTQKSLSLSPGK | |
| 2210 | APELLGGPSVFLFPPKPKDTLMISRTPEVTCVVVDVSHEDPEVKFNWYVDG | Clone CH3C.35.21.2 |
| | VEVHNAKTKPREEQYNSTYRVVSVLTVLHQDWLNGKEYKCKVSNKALP | |
| | APIEKTISKAKGQPREPQVYTLPPSRDELTKNQVSLTCLVKGFYPSDIAVLW | |
| | ESYGTEWSSYRTTPPVLDSDGSFFLYSKLTVTKSEWQQGFVFSCSVMHEA | |
| | LHNHYTQKSLSLSPGK | |
| 2211 | APELLGGPSVFLFPPKPKDTLMISRTPEVTCVVVDVSHEDPEVKFNWYVDG | Clone CH3C.35.21.3 |
| | VEVHNAKTKPREEQYNSTYRVVSVLTVLHQDWLNGKEYKCKVSNKALP | |
| | APIEKTISKAKGQPREPQVYTLPPSRDELTKNQVSLTCLVKGFYPSDIAVLW | |
| | ESYGTEWSSYRTTPPVLDSDGSFFLYSKLTVTREEWQQGFVFSCSVMHEA | |
| | LHNHYTQKSLSLSPGK | |
| 2212 | APELLGGPSVFLFPPKPKDTLMISRTPEVTCVVVDVSHEDPEVKFNWYVDG | Clone CH3C.35.21.4 |
| | VEVHNAKTKPREEQYNSTYRVVSVLTVLHQDWLNGKEYKCKVSNKALP | |
| | APIEKTISKAKGQPREPQVYTLPPSRDELTKNQVSLTCLVKGFYPSDIAVLW | |
| | ESYGTEWSSYRTTPPVLDSDGSFFLYSKLTVTGEEWQQGFVFSCSVMHEA | |
| | LHNHYTQKSLSLSPGK | |
| 2213 | APELLGGPSVFLFPPKPKDTLMISRTPEVTCVVVDVSHEDPEVKFNWYVDG | Clone CH3C.35.21.5 |
| | VEVHNAKTKPREEQYNSTYRVVSVLTVLHQDWLNGKEYKCKVSNKALP | |
| | APIEKTISKAKGQPREPQVYTLPPSRDELTKNQVSLTCLVKGFYPSDIAVLW | |
| | ESYGTEWSSYRTTPPVLDSDGSFFLYSKLTVTREEWQQGFVFSCWVMHEA | |
| | LHNHYTQKSLSLSPGK | |
| 2214 | APELLGGPSVFLFPPKPKDTLMISRTPEVTCVVVDVSHEDPEVKFNWYVDG | Clone CH3C.35.21.6 |
| | VEVHNAKTKPREEQYNSTYRVVSVLTVLHQDWLNGKEYKCKVSNKALP | |
| | APIEKTISKAKGQPREPQVYTLPPSRDELTKNQVSLTCLVKGFYPSDIAVLW | |
| | ESYGTEWSSYRTTPPVLDSDGSFFLYSKLTVTKEEWQQGFVFSCWVMHEA | |
| | LHNHYTQKSLSLSPGK | |
| 2215 | APELLGGPSVFLFPPKPKDTLMISRTPEVTCVVVDVSHEDPEVKFNWYVDG | Clone CH3C.35.21.7 |
| | VEVHNAKTKPREEQYNSTYRVVSVLTVLHQDWLNGKEYKCKVSNKALP | |
| | APIEKTISKAKGQPREPQVYTLPPSRDELTKNQVSLTCLVKGFYPSDIAVLW | |
| | ESYGTEWSSYRTTPPVLDSDGSFFLYSKLTVTREEWQQGFVFTCWVMHEA | |
| | LHNHYTQKSLSLSPGK | |
| 2216 | APELLGGPSVFLFPPKPKDTLMISRTPEVTCVVVDVSHEDPEVKFNWYVDG | Clone CH3C.35.21.8 |
| | VEVHNAKTKPREEQYNSTYRVVSVLTVLHQDWLNGKEYKCKVSNKALP | |
| | APIEKTISKAKGQPREPQVYTLPPSRDELTKNQVSLTCLVKGFYPSDIAVLW | |
| | ESYGTEWSSYRTTPPVLDSDGSFFLYSKLTVTREEWQQGFVFTCGVMHEA | |
| | LHNHYTQKSLSLSPGK | |
| 2217 | APELLGGPSVFLFPPKPKDTLMISRTPEVTCVVVDVSHEDPEVKFNWYVDG | Clone CH3C.35.21.9 |
| | VEVHNAKTKPREEQYNSTYRVVSVLTVLHQDWLNGKEYKCKVSNKALP | |
| | APIEKTISKAKGQPREPQVYTLPPSRDELTKNQVSLTCLVKGFYPSDIAVLW | |
| | ESYGTEWSSYRTTPPVLDSDGSFFLYSKLTVTREEWQQGFVFECWVMHEA | |
| | LHNHYTQKSLSLSPGK | |
| 2218 | APELLGGPSVFLFPPKPKDTLMISRTPEVTCVVVDVSHEDPEVKFNWYVDG | Clone CH3C.35.21.10 |
| | VEVHNAKTKPREEQYNSTYRVVSVLTVLHQDWLNGKEYKCKVSNKALP | |
| | APIEKTISKAKGQPREPQVYTLPPSRDELTKNQVSLTCLVKGFYPSDIAVLW | |
| | ESYGTEWSSYRTTPPVLDSDGSFFLYSKLTVTREEWQQGFVFKCWVMHEA | |
| | LHNHYTQKSLSLSPGK | |
| 2219 | APELLGGPSVFLFPPKPKDTLMISRTPEVTCVVVDVSHEDPEVKFNWYVDG | Clone CH3C.35.21.11 |
| | VEVHNAKTKPREEQYNSTYRVVSVLTVLHQDWLNGKEYKCKVSNKALP | |
| | APIEKTISKAKGQPREPQVYTLPPSRDELTKNQVSLTCLVKGFYPSDIAVLW | |
| | ESYGTEWSSYRTTPPVLDSDGSFFLYSKLTVTPEEWQQGFVFKCWVMHEA | |
| | LHNHYTQKSLSLSPGK | |
| 2220 | APELLGGPSVFLFPPKPKDTLMISRTPEVTCVVVDVSHEDPEVKFNWYVDG | Clone CH3C.35.21.12 |
| | VEVHNAKTKPREEQYNSTYRVVSVLTVLHQDWLNGKEYKCKVSNKALP | |
| | APIEKTISKAKGQPREPQVYTLPPSRDELTKNQVSLTCLVKGFYPSDIAVW | |
| | WESYGTEWSSYRTTPPVLDSDGSFFLYSKLTVTREEWQQGFVFSCSVMHE | |
| | ALHNHYTQKSLSLSPGK | |
| 2221 | APELLGGPSVFLFPPKPKDTLMISRTPEVTCVVVDVSHEDPEVKFNWYVDG | Clone CH3C.35.21.13 |
| | VEVHNAKTKPREEQYNSTYRVVSVLTVLHQDWLNGKEYKCKVSNKALP | |
| | APIEKTISKAKGQPREPQVYTLPPSRDELTKNQVSLTCLVKGFYPSDIAVW | |
| | WESYGTEWSSYRTTPPVLDSDGSFFLYSKLTVTGEEWQQGFVFSCSVMHE | |
| | ALHNHYTQKSLSLSPGK | |
| 2222 | APELLGGPSVFLFPPKPKDTLMISRTPEVTCVVVDVSHEDPEVKFNWYVDG | Clone CH3C.35.21.14 |
| | VEVHNAKTKPREEQYNSTYRVVSVLTVLHQDWLNGKEYKCKVSNKALP | |
| | APIEKTISKAKGQPREPQVYTLPPSRDELTKNQVSLTCLVKGFYPSDIAVW | |
| | WESYGTEWSSYRTTPPVLDSDGSFFLYSKLTVTREEWQQGFVFTCWVMH | |
| | EALHNHYTQKSLSLSPGK | |
| 2223 | APELLGGPSVFLFPPKPKDTLMISRTPEVTCVVVDVSHEDPEVKFNWYVDG | Clone CH3C.35.21.15 |
| | VEVHNAKTKPREEQYNSTYRVVSVLTVLHQDWLNGKEYKCKVSNKALP | |
| | APIEKTISKAKGQPREPQVYTLPPSRDELTKNQVSLTCLVKGFYPSDIAVW | |
| | WESYGTEWSSYRTTPPVLDSDGSFFLYSKLTVTGEEWQQGFVFTCWVMH | |
| | EALHNHYTQKSLSLSPGK | |
| 2224 | APELLGGPSVFLFPPKPKDTLMISRTPEVTCVVVDVSHEDPEVKFNWYVDG | Clone CH3C.35.21.16 |
| | VEVHNAKTKPREEQYNSTYRVVSVLTVLHQDWLNGKEYKCKVSNKALP | |
| | APIEKTISKAKGQPREPQVYTLPPSRDELTKNQVSLTCLVKGFYPSDIAVW | |
| | WESYGTEWSSYRTTPPVLDSDGSFFLYSKLTVTREEWQQGFVFTCGVMHE | |
| | ALHNHYTQKSLSLSPGK | |
| 2225 | APELLGGPSVFLFPPKPKDTLMISRTPEVTCVVVDVSHEDPEVKFNWYVDG | Clone CH3C.35.21.18 |
| | VEVHNAKTKPREEQYNSTYRVVSVLTVLHQDWLNGKEYKCKVSNKALP | |
| | APIEKTISKAKGQPREPQVYTLPPSRDELTKNQVSLTCLVKGFYPSDIAVLW | |
| | ESYGTEWSSYRTTPPVLDSDGSFFLYSKLTVTKEEWQQGFVFSCSVMHEA | |
| | LHNHYTQKSLSLSPGK | |
| 2226 | APELLGGPSVFLFPPKPKDTLMISRTPEVTCVVVDVSHEDPEVKFNWYVDG | Clone CH3B.1 |
| | VEVHNAKTKPREEQYNSTYRVVSVLTVLHQDWLNGKEYKCKVSNKALP | |
| | APIEKTISKAKGQPRFDYVTTLPPSRDELTKNQVSLTCLVKGFYPSDIAVEW | |
| | ESNGQPENNYKTTPPVLDSDGSFFLYSKLTVDKSRWQQGNVFSCSVMHEA | |
| | LHNHYGFHDLSLSPGK | |
| 2227 | APELLGGPSVFLFPPKPKDTLMISRTPEVTCVVVDVSHEDPEVKFNWYVDG | Clone CH3B.2 |
| | VEVHNAKTKPREEQYNSTYRVVSVLTVLHQDWLNGKEYKCKVSNKALP | |
| | APIEKTISKAKGQPRFDMVTTLPPSRDELTKNQVSLTCLVKGFYPSDIAVE | |
| | WESNGQPENNYKTTPPVLDSDGSFFLYSKLTVDKSRWQQGNVFSCSVMH | |
| | EALHNHYGFHDLSLSPGK | |
| 2228 | APELLGGPSVFLFPPKPKDTLMISRTPEVTCVVVDVSHEDPEVKFNWYVDG | Clone CH3B.3 |
| | VEVHNAKTKPREEQYNSTYRVVSVLTVLHQDWLNGKEYKCKVSNKALP | |
| | APIEKTISKAKGQPRFEYVTTLPPSRDELTKNQVSLTCLVKGFYPSDIAVEW | |
| | ESNGQPENNYKTTPPVLDSDGSFFLYSKLTVDKSRWQQGNVFSCSVMHEA | |
| | LHNHYGFHDLSLSPGK | |
| 2229 | APELLGGPSVFLFPPKPKDTLMISRTPEVTCVVVDVSHEDPEVKFNWYVDG | Clone CH3B.4 |
| | VEVHNAKTKPREEQYNSTYRVVSVLTVLHQDWLNGKEYKCKVSNKALP | |
| | APIEKTISKAKGQPRFEMVTTLPPSRDELTKNQVSLTCLVKGFYPSDIAVEW | |
| | ESNGQPENNYKTTPPVLDSDGSFFLYSKLTVDKSRWQQGNVFSCSVMHEA | |
| | LHNHYGFHDLSLSPGK | |
| 2230 | APELLGGPSVFLFPPKPKDTLMISRTPEVTCVVVDVSHEDPEVKFNWYVDG | Clone CH3B.5 |
| | VEVHNAKTKPREEQYNSTYRVVSVLTVLHQDWLNGKEYKCKVSNKALP | |
| | APIEKTISKAKGQPRFELVTTLPPSRDELTKNQVSLTCLVKGFYPSDIAVEW | |
| | ESNGQPENNYKTTPPVLDSDGSFFLYSKLTVDKSRWQQGNVFSCSVMHEA | |
| | LHNHYGFHDLSLSPGK | |
| 2231 | APELLGGPSVFLFPPKPKDTLMISRTPEVTCVVVDVSHEDPEVEFIWYVDG | Clone CH2A2.1 |
| | VDVRYEWQLPREEQYNSTYRVVSVLTVLHQDWLNGKEYKCKVSNKALP | |
| | APIEKTISKAKGQPREPQVYTLPPSRDELTKNQVSLTCLVKGFYPSDIAVEW | |
| | ESNGQPENNYKTTPPVLDSDGSFFLYSKLTVDKSRWQQGNVFSCSVMHEA | |
| | LHNHYTQKSLSLSPGK | |
| 2232 | APELLGGPSVFLFPPKPKDTLMISRTPEVTCVVVDVSHEDPEVGFVWYVDG | Clone CH2A2.2 |
| | VPVSWEWYWPREEQYNSTYRVVSVLTVLHQDWLNGKEYKCKVSNKALP | |
| | APIEKTISKAKGQPREPQVYTLPPSRDELTKNQVSLTCLVKGFYPSDIAVEW | |
| | ESNGQPENNYKTTPPVLDSDGSFFLYSKLTVDKSRWQQGNVFSCSVMHEA | |
| | LHNHYTQKSLSLSPGK | |
| 2233 | APELLGGPSVFLFPPKPKDTLMISRTPEVTCVVVDVSHEDPEVQFDWYVDG | Clone CH2A2.3 |
| | VMVRREWHRPREEQYNSTYRVVSVLTVLHQDWLNGKEYKCKVSNKALP | |
| | APIEKTISKAKGQPREPQVYTLPPSRDELTKNQVSLTCLVKGFYPSDIAVEW | |
| | ESNGQPENNYKTTPPVLDSDGSFFLYSKLTVDKSRWQQGNVFSCSVMHEA | |
| | LHNHYTQKSLSLSPGK | |
| 2234 | APELLGGPSVFLFPPKPKDTLMISRTPEVTCVVVDVSHEDPEVSFEWYVDG | Clone CH2A2.4 |
| | VPVRWEWQWPREEQYNSTYRVVSVLTVLHQDWLNGKEYKCKVSNKALP | |
| | APIEKTISKAKGQPREPQVYTLPPSRDELTKNQVSLTCLVKGFYPSDIAVEW | |
| | ESNGQPENNYKTTPPVLDSDGSFFLYSKLTVDKSRWQQGNVFSCSVMHEA | |
| | LHNHYTQKSLSLSPGK | |
| 2235 | APELLGGPSVFLFPPKPKDTLMISRTPEVTCVVVDVSHEDPEVAFTWYVDG | Clone CH2A2.5 |
| | VPVRWEWQNPREEQYNSTYRVVSVLTVLHQDWLNGKEYKCKVSNKALP | |
| | APIEKTISKAKGQPREPQVYTLPPSRDELTKNQVSLTCLVKGFYPSDIAVEW | |
| | ESNGQPENNYKTTPPVLDSDGSFFLYSKLTVDKSRWQQGNVFSCSVMHEA | |
| | LHNHYTQKSLSLSPGK | |
| 2236 | APELLGGPSVFLFPPKPKDTLMISRTPEVTCVVVDPQTPPWEVKFNWYVD | Clone CH2C.1 |
| | GVEVHNAKTKPREEEYYTYYRVVSVLTVLHQDWLNGKEYKCKVSNKAL | |
| | PAPIEKTISKAKGQPREPQVYTLPPSRDELTKNQVSLTCLVKGFYPSDIAVE | |
| | WESNGQPENNYKTTPPVLDSDGSFFLYSKLTVDKSRWQQGNVFSCSVMH | |
| | EALHNHYTQKSLSLSPGK | |
| 2237 | APELLGGPSVFLFPPKPKDTLMISRTPEVTCVVVDPPSPPWEVKFNWYVDG | Clone CH2C.2 |
| | VEVHNAKTKPREEEYYSNYRVVSVLTVLHQDWLNGKEYKCKVSNKALP | |
| | APIEKTISKAKGQPREPQVYTLPPSRDELTKNQVSLTCLVKGFYPSDIAVEW | |
| | ESNGQPENNYKTTPPVLDSDGSFFLYSKLTVDKSRWQQGNVFSCSVMHEA | |
| | LHNHYTQKSLSLSPGK | |
| 2238 | APELLGGPSVFLFPPKPKDTLMISRTPEVTCVVVDPQTPPWEVKFNWYVD | |
| | GVEVHNAKTKPREEEYYSNYRVVSVLTVLHQDWLNGKEYKCKVSNKAL | Clone CH2C.3 |
| | PAPIEKTISKAKGQPREPQVYTLPPSRDELTKNQVSLTCLVKGFYPSDIAVE | |
| | WESNGQPENNYKTTPPVLDSDGSFFLYSKLTVDKSRWQQGNVFSCSVMH | |
| | EALHNHYTQKSLSLSPGK | |
| 2239 | APELLGGPSVFLFPPKPKDTLMISRTPEVTCVVVDFRGPPWEVKFNWYVD | Clone CH2C.4 |
| | GVEVHNAKTKPREEEYYHDYRVVSVLTVLHQDWLNGKEYKCKVSNKAL | |
| | PAPIEKTISKAKGQPREPQVYTLPPSRDELTKNQVSLTCLVKGFYPSDIAVE | |
| | WESNGQPENNYKTTPPVLDSDGSFFLYSKLTVDKSRWQQGNVFSCSVMH | |
| | EALHNHYTQKSLSLSPGK | |
| 2240 | APELLGGPSVFLFPPKPKDTLMISRTPEVTCVVVDPQTVPWEVKFNWYVD | Clone CH2C.5 |
| | GVEVHNAKTKPREEEYYSNYRVVSVLTVLHQDWLNGKEYKCKVSNKAL | |
| | PAPIEKTISKAKGQPREPQVYTLPPSRDELTKNQVSLTCLVKGFYPSDIAVE | |
| | WESNGQPENNYKTTPPVLDSDGSFFLYSKLTVDKSRWQQGNVFSCSVMH | |
| | EALHNHYTQKSLSLSPGK | |
| 2241 | APELLGGPSVFLFPPKPKDTLMISRTPEVTCVVVDVSVPPRMVKFNWYVD | Clone CH2D.1 |
| | GVEVHNAKTKSLTSQHNSTVRVVSVLTVLHQDWLNGKEYKCKVSNKALP | |
| | APIEKTISKAKGQPREPQVYTLPPSRDELTKNQVSLTCLVKGFYPSDIAVEW | |
| | ESNGQPENNYKTTPPVLDSDGSFFLYSKLTVDKSRWQQGNVFSCSVMHEA | |
| | LHNHYTQKSLSLSPGK | |
| 2242 | APELLGGPSVFLFPPKPKDTLMISRTPEVTCVVVDVSVPPWMVKFNWYVD | Clone CH2D.2 |
| | GVEVHNAKTKSLTSQHNSTVRVVSVLTVLHQDWLNGKEYKCKVSNKALP | |
| | APIEKTISKAKGQPREPQVYTLPPSRDELTKNQVSLTCLVKGFYPSDIAVEW | |
| | ESNGQPENNYKTTPPVLDSDGSFFLYSKLTVDKSRWQQGNVFSCSVMHEA | |
| | LHNHYTQKSLSLSPGK | |
| 2243 | APELLGGPSVFLFPPKPKDTLMISRTPEVTCVVVDVSDMWEYVKFNWYVD | Clone CH2D.3 |
| | GVEVHNAKTKPWVKQLNSTWRVVSVLTVLHQDWLNGKEYKCKVSNKA | |
| | LPAPIEKTISKAKGQPREPQVYTLPPSRDELTKNQVSLTCLVKGFYPSDIAV | |
| | EWESNGQPENNYKTTPPVLDSDGSFFLYSKLTVDKSRWQQGNVFSCSVM | |
| | HEALHNHYTQKSLSLSPGK | |
| 2244 | APELLGGPSVFLFPPKPKDTLMISRTPEVTCVVVDVSDDWTWVKFNWYVD | Clone CH2D.4 |
| | GVEVHNAKTKPWIAQPNSTWRVVSVLTVLHQDWLNGKEYKCKVSNKAL | |
| | PAPIEKTISKAKGQPREPQVYTLPPSRDELTKNQVSLTCLVKGFYPSDIAVE | |
| | WESNGQPENNYKTTPPVLDSDGSFFLYSKLTVDKSRWQQGNVFSCSVMH | |
| | EALHNHYTQKSLSLSPGK | |
| 2245 | APELLGGPSVFLFPPKPKDTLMISRTPEVTCVVVDVSDDWEWVKFNWYVD | Clone CH2D.5 |
| | GVEVHNAKTKPWKLQLNSTWRVVSVLTVLHQDWLNGKEYKCKVSNKAL | |
| | PAPIEKTISKAKGQPREPQVYTLPPSRDELTKNQVSLTCLVKGFYPSDIAVE | |
| | WESNGQPENNYKTTPPVLDSDGSFFLYSKLTVDKSRWQQGNVFSCSVMH | |
| | EALHNHYTQKSLSLSPGK | |
| 2246 | APELLGGPSVFLFPPKPKDTLMISRTPEVTCVVVDVSHEDPWVWFYWYVD | Clone CH2E3.1 |
| | GVEVHNAKTKPREEQYNSTYRVVSVLTVLHQDWLNGKEYKCSVVNIAL | |
| | WWSIEKTISKAKGQPREPQVYTLPPSRDELTKNQVSLTCLVKGFYPSDIAV | |
| | EWESNGQPENNYKTTPPVLDSDGSFFLYSKLTVDKSRWQQGNVFSCSVM | |
| | HEALHNHYTQKSLSLSPGK | |
| 2247 | APELLGGPSVFLFPPKPKDTLMISRTPEVTCVVVDVSHEDPVVGFRWYVD | Clone CH2E3.2 |
| | GVEVHNAKTKPREEQYNSTYRVVSVLTVLHQDWLNGKEYKCRVSNSALT | |
| | WKIEKTISKAKGQPREPQVYTLPPSRDELTKNQVSLTCLVKGFYPSDIAVE | |
| | WESNGQPENNYKTTPPVLDSDGSFFLYSKLTVDKSRWQQGNVFSCSVMH | |
| | EALHNHYTQKSLSLSPGK | |
| 2248 | APELLGGPSVFLFPPKPKDTLMISRTPEVTCVVVDVSHEDPVVGFRWYVD | Clone CH2E3.3 |
| | GVEVHNAKTKPREEQYNSTYRVVSVLTVLHQDWLNGKEYKCRVSNSALS | |
| | WRIEKTISKAKGQPREPQVYTLPPSRDELTKNQVSLTCLVKGFYPSDIAVE | |
| | WESNGQPENNYKTTPPVLDSDGSFFLYSKLTVDKSRWQQGNVFSCSVMH | |
| | EALHNHYTQKSLSLSPGK | |
| 2249 | APELLGGPSVFLFPPKPKDTLMISRTPEVTCVVVDVSHEDPIVGFRWYVDG | Clone CH2E3.4 |
| | VEVHNAKTKPREEQYNSTYRVVSVLTVLHQDWLNGKEYKCRVSNSALR | |
| | WRIEKTISKAKGQPREPQVYTLPPSRDELTKNQVSLTCLVKGFYPSDIAVE | |
| | WESNGQPENNYKTTPPVLDSDGSFFLYSKLTVDKSRWQQGNVFSCSVMH | |
| | EALHNHYTQKSLSLSPGK | |
| 2250 | APELLGGPSVFLFPPKPKDTLMISRTPEVTCVVVDVSHEDPAVGFEWYVDG | Clone CH2E3.5 |
| | VEVHNAKTKPREEQYNSTYRVVSVLTVLHQDWLNGKEYKCQVFNWALD | |
| | WVIEKTISKAKGQPREPQVYTLPPSRDELTKNQVSLTCLVKGFYPSDIAVE | |
| | WESNGQPENNYKTTPPVLDSDGSFFLYSKLTVDKSRWQQGNVFSCSVMH | |
| | EALHNHYTQKSLSLSPGK | |
| 2251 | APELLGGPSVFLFPPKPKDTLMISRTPEVTCVVVDVSHEDPEVKFNWYVDG | Fc sequence with hole |
| | VEVHNAKTKPREEQYNSTYRVVSVLTVLHQDWLNGKEYKCKVSNKALP | mutations |
| | APIEKTISKAKGQPREPQVYTLPPSRDELTKNQVSLSCAVKGFYPSDIAVEW | |
| | ESNGQPENNYKTTPPVLDSDGSFFLVSKLTVDKSRWQQGNVFSCSVMHEA | |
| | LHNHYTQKSLSLSPGK | |
| 2252 | APEAAGGPSVFLFPPKPKDTLMISRTPEVTCVVVDVSHEDPEVKFNWYVD | Fc sequence with hole |
| | GVEVHNAKTKPREEQYNSTYRVVSVLTVLHQDWLNGKEYKCKVSNKAL | and LALA mutations |
| | PAPIEKTISKAKGQPREPQVYTLPPSRDELTKNQVSLSCAVKGFYPSDIAVE | |
| | WESNGQPENNYKTTPPVLDSDGSFFLVSKLTVDKSRWQQGNVFSCSVMH | |
| | EALHNHYTQKSLSLSPGK | |
| 2253 | APELLGGPSVFLFPPKPKDTLYITREPEVTCVVVDVSHEDPEVKFNWYVDG | Fc sequence with hole |
| | VEVHNAKTKPREEQYNSTYRVVSVLTVLHQDWLNGKEYKCKVSNKALP | and YTE mutations |
| | APIEKTISKAKGQPREPQVYTLPPSRDELTKNQVSLSCAVKGFYPSDIAVEW | |
| | ESNGQPENNYKTTPPVLDSDGSFFLVSKLTVDKSRWQQGNVFSCSVMHEA | |
| | LHNHYTQKSLSLSPGK | |
| 2254 | APEAAGGPSVFLFPPKPKDTLYITREPEVTCVVVDVSHEDPEVKFNWYVD | Fc sequence with hole, |
| | GVEVHNAKTKPREEQYNSTYRVVSVLTVLHQDWLNGKEYKCKVSNKAL | LALA, and YTE mutations |
| | PAPIEKTISKAKGQPREPQVYTLPPSRDELTKNQVSLSCAVKGFYPSDIAVE | |
| | WESNGQPENNYKTTPPVLDSDGSFFLVSKLTVDKSRWQQGNVFSCSVMH | |
| | EALHNHYTQKSLSLSPGK | |
| 2255 | APELLGGPSVFLFPPKPKDTLMISRTPEVTCVVVDVSHEDPEVKFNWYVDG | Fc sequence with knob |
| | VEVHNAKTKPREEQYNSTYRVVSVLTVLHQDWLNGKEYKCKVSNKALP | mutation |
| | APIEKTISKAKGQPREPQVYTLPPSRDELTKNQVSLWCLVKGFYPSDIAVE | |
| | WESNGQPENNYKTTPPVLDSDGSFFLYSKLTVDKSRWQQGNVFSCSVMH | |
| | EALHNHYTQKSLSLSPGK | |
| 2256 | APEAAGGPSVFLFPPKPKDTLMISRTPEVTCVVVDVSHEDPEVKFNWYVD | Fc sequence with knob |
| | GVEVHNAKTKPREEQYNSTYRVVSVLTVLHQDWLNGKEYKCKVSNKAL | and LALA mutations |
| | PAPIEKTISKAKGQPREPQVYTLPPSRDELTKNQVSLWCLVKGFYPSDIAVE | |
| | WESNGQPENNYKTTPPVLDSDGSFFLYSKLTVDKSRWQQGNVFSCSVMH | |
| | EALHNHYTQKSLSLSPGK | |
| 2257 | APELLGGPSVFLFPPKPKDTLYITREPEVTCVVVDVSHEDPEVKFNWYVDG | Fc sequence with knob |
| | VEVHNAKTKPREEQYNSTYRVVSVLTVLHQDWLNGKEYKCKVSNKALP | and YTE mutations |
| | APIEKTISKAKGQPREPQVYTLPPSRDELTKNQVSLWCLVKGFYPSDIAVE | |
| | WESNGQPENNYKTTPPVLDSDGSFFLYSKLTVDKSRWQQGNVFSCSVMH | |
| | EALHNHYTQKSLSLSPGK | |
| 2258 | APEAAGGPSVFLFPPKPKDTLYITREPEVTCVVVDVSHEDPEVKFNWYVD | Fc sequence with knob, |
| | GVEVHNAKTKPREEQYNSTYRVVSVLTVLHQDWLNGKEYKCKVSNKAL | LALA, and YTE mutations |
| | PAPIEKTISKAKGQPREPQVYTLPPSRDELTKNQVSLWCLVKGFYPSDIAVE | |
| | WESNGQPENNYKTTPPVLDSDGSFFLYSKLTVDKSRWQQGNVFSCSVMH | |
| | EALHNHYTQKSLSLSPGK | |
| 2259 | APELLGGPSVFLFPPKPKDTLMISRTPEVTCVVVDVSHEDPEVKFNWYVDG | Clone CH3C.35.21 with |
| | VEVHNAKTKPREEQYNSTYRVVSVLTVLHQDWLNGKEYKCKVSNKALP | knob mutation |
| | APIEKTISKAKGQPREPQVYTLPPSRDELTKNQVSLWCLVKGFYPSDIAVW | |
| | WESYGTEWSSYKTTPPVLDSDGSFFLYSKLTVTKEEWQQGFVFSCSVMHE | |
| | ALHNHYTQKSLSLSPGK | |
| 2260 | APEAAGGPSVFLFPPKPKDTLMISRTPEVTCVVVDVSHEDPEVKFNWYVD | Clone CH3C.35.21 with |
| | GVEVHNAKTKPREEQYNSTYRVVSVLTVLHQDWLNGKEYKCKVSNKAL | knob and LALA mutations |
| | PAPIEKTISKAKGQPREPQVYTLPPSRDELTKNQVSLWCLVKGFYPSDIAV | |
| | WWESYGTEWSSYKTTPPVLDSDGSFFLYSKLTVTKEEWQQGFVFSCSVM | |
| | HEALHNHYTQKSLSLSPGK | |
| 2261 | APELLGGPSVFLFPPKPKDTLYITREPEVTCVVVDVSHEDPEVKFNWYVDG | Clone CH3C.35.21 with |
| | VEVHNAKTKPREEQYNSTYRVVSVLTVLHQDWLNGKEYKCKVSNKALP | knob and YTE mutations |
| | APIEKTISKAKGQPREPQVYTLPPSRDELTKNQVSLWCLVKGFYPSDIAVW | |
| | WESYGTEWSSYKTTPPVLDSDGSFFLYSKLTVTKEEWQQGFVFSCSVMHE | |
| | ALHNHYTQKSLSLSPGK | |
| 2262 | APEAAGGPSVFLFPPKPKDTLYITREPEVTCVVVDVSHEDPEVKFNWYVD | Clone CH3C.35.21 with |
| | GVEVHNAKTKPREEQYNSTYRVVSVLTVLHQDWLNGKEYKCKVSNKAL | knob, LALA, and YTE |
| | PAPIEKTISKAKGQPREPQVYTLPPSRDELTKNQVSLWCLVKGFYPSDIAV | mutations |
| | WWESYGTEWSSYKTTPPVLDSDGSFFLYSKLTVTKEEWQQGFVFSCSVM | |
| | HEALHNHYTQKSLSLSPGK | |
| 2263 | APELLGGPSVFLFPPKPKDTLMISRTPEVTCVVVDVSHEDPEVKFNWYVDG | Clone CH3C.35.21 with |
| | VEVHNAKTKPREEQYNSTYRVVSVLTVLHQDWLNGKEYKCKVSNKALP | hole mutations |
| | APIEKTISKAKGQPREPQVYTLPPSRDELTKNQVSLSCAVKGFYPSDIAVW | |
| | WESYGTEWSSYKTTPPVLDSDGSFFLVSKLTVTKEEWQQGFVFSCSVMHE | |
| | ALHNHYTQKSLSLSPGK | |
| 2264 | APEAAGGPSVFLFPPKPKDTLMISRTPEVTCVVVDVSHEDPEVKFNWYVD | Clone CH3C.35.21 with |
| | GVEVHNAKTKPREEQYNSTYRVVSVLTVLHQDWLNGKEYKCKVSNKAL | hole and LALA mutations |
| | PAPIEKTISKAKGQPREPQVYTLPPSRDELTKNQVSLSCAVKGFYPSDIAVW | |
| | WESYGTEWSSYKTTPPVLDSDGSFFLVSKLTVTKEEWQQGFVFSCSVMHE | |
| | ALHNHYTQKSLSLSPGK | |
| 2265 | APELLGGPSVFLFPPKPKDTLYITREPEVTCVVVDVSHEDPEVKFNWYVDG | Clone CH3C.35.21 with |
| | VEVHNAKTKPREEQYNSTYRVVSVLTVLHQDWLNGKEYKCKVSNKALP | hole and YTE mutations |
| | APIEKTISKAKGQPREPQVYTLPPSRDELTKNQVSLSCAVKGFYPSDIAVW | |
| | WESYGTEWSSYKTTPPVLDSDGSFFLVSKLTVTKEEWQQGFVFSCSVMHE | |
| | ALHNHYTQKSLSLSPGK | |
| 2266 | APEAAGGPSVFLFPPKPKDTLYITREPEVTCVVVDVSHEDPEVKFNWYVD | Clone CH3C.35.21 with |
| | GVEVHNAKTKPREEQYNSTYRVVSVLTVLHQDWLNGKEYKCKVSNKAL | hole, LALA, and YTE |
| | PAPIEKTISKAKGQPREPQVYTLPPSRDELTKNQVSLSCAVKGFYPSDIAVW | mutations |
| | WESYGTEWSSYKTTPPVLDSDGSFFLVSKLTVTKEEWQQGFVFSCSVMHE | |
| | ALHNHYTQKSLSLSPGK | |
| 2267 | APELLGGPSVFLFPPKPKDTLMISRTPEVTCVVVDVSHEDPEVKFNWYVDG | Clone CH3C.35.20.1 |
| | VEVHNAKTKPREEQYNSTYRVVSVLTVLHQDWLNGKEYKCKVSNKALP | with knob mutation |
| | APIEKTISKAKGQPREPQVYTLPPSRDELTKNQVSLWCLVKGFYPSDIAVE | |
| | WESFGTEWSSYKTTPPVLDSDGSFFLYSKLTVTKEEWQQGFVFSCSVMHE | |
| | ALHNHYTQKSLSLSPGK | |
| 2268 | APEAAGGPSVFLFPPKPKDTLMISRTPEVTCVVVDVSHEDPEVKFNWYVD | Clone CH3C.35.20.1 |
| | GVEVHNAKTKPREEQYNSTYRVVSVLTVLHQDWLNGKEYKCKVSNKAL | with knob and LALA |
| | PAPIEKTISKAKGQPREPQVYTLPPSRDELTKNQVSLWCLVKGFYPSDIAVE | mutations |
| | WESFGTEWSSYKTTPPVLDSDGSFFLYSKLTVTKEEWQQGFVFSCSVMHE | |
| | ALHNHYTQKSLSLSPGK | |
| 2269 | APEAAGGPSVFLFPPKPKDTLMISRTPEVTCVVVDVSHEDPEVKFNWYVD | Clone CH3C.35.20.1 |
| | GVEVHNAKTKPREEQYNSTYRVVSVLTVLHQDWLNGKEYKCKVSNKAL | with knob and LALAPG |
| | GAPIEKTISKAKGQPREPQVYTLPPSRDELTKNQVSLWCLVKGFYPSDIAV | mutations |
| | EWESFGTEWSSYKTTPPVLDSDGSFFLYSKLTVTKEEWQQGFVFSCSVMH | |
| | EALHNHYTQKSLSLSPGK | |
| 2270 | APELLGGPSVFLFPPKPKDTLYITREPEVTCVVVDVSHEDPEVKFNWYVDG | Clone CH3C.35.20.1 |
| | VEVHNAKTKPREEQYNSTYRVVSVLTVLHQDWLNGKEYKCKVSNKALP | with knob and YTE |
| | APIEKTISKAKGQPREPQVYTLPPSRDELTKNQVSLWCLVKGFYPSDIAVE | mutations |
| | WESFGTEWSSYKTTPPVLDSDGSFFLYSKLTVTKEEWQQGFVFSCSVMHE | |
| | ALHNHYTQKSLSLSPGK | |
| 2271 | APEAAGGPSVFLFPPKPKDTLYITREPEVTCVVVDVSHEDPEVKFNWYVD | Clone CH3C.35.20.1 |
| | GVEVHNAKTKPREEQYNSTYRVVSVLTVLHQDWLNGKEYKCKVSNKAL | with knob, LALA, and |
| | PAPIEKTISKAKGQPREPQVYTLPPSRDELTKNQVSLWCLVKGFYPSDIAVE | YTE mutations |
| | WESFGTEWSSYKTTPPVLDSDGSFFLYSKLTVTKEEWQQGFVFSCSVMHE | |
| | ALHNHYTQKSLSLSPGK | |
| 2272 | APEAAGGPSVFLFPPKPKDTLYITREPEVTCVVVDVSHEDPEVKFNWYVD | Clone CH3C.35.20.1 |
| | GVEVHNAKTKPREEQYNSTYRVVSVLTVLHQDWLNGKEYKCKVSNKAL | with knob, LALAPG, and |
| | GAPIEKTISKAKGQPREPQVYTLPPSRDELTKNQVSLWCLVKGFYPSDIAV | YTE mutations |
| | EWESFGTEWSSYKTTPPVLDSDGSFFLYSKLTVTKEEWQQGFVFSCSVMH | |
| | EALHNHYTQKSLSLSPGK | |
| 2273 | APELLGGPSVFLFPPKPKDTLMISRTPEVTCVVVDVSHEDPEVKFNWYVDG | Clone CH3C.35.20.1 with |
| | VEVHNAKTKPREEQYNSTYRVVSVLTVLHQDWLNGKEYKCKVSNKALP | hole mutations |
| | APIEKTISKAKGQPREPQVYTLPPSRDELTKNQVSLSCAVKGFYPSDIAVEW | |
| | ESFGTEWSSYKTTPPVLDSDGSFFLVSKLTVTKEEWQQGFVFSCSVMHEAL | |
| | HNHYTQKSLSLSPGK | |
| 2274 | APEAAGGPSVFLFPPKPKDTLMISRTPEVTCVVVDVSHEDPEVKFNWYVD | Clone CH3C.35.20.1 with |
| | GVEVHNAKTKPREEQYNSTYRVVSVLTVLHQDWLNGKEYKCKVSNKAL | hole and LALA mutations |
| | PAPIEKTISKAKGQPREPQVYTLPPSRDELTKNQVSLSCAVKGFYPSDIAVE | |
| | WESFGTEWSSYKTTPPVLDSDGSFFLVSKLTVTKEEWQQGFVFSCSVMHE | |
| | ALHNHYTQKSLSLSPGK | |
| 2275 | APEAAGGPSVFLFPPKPKDTLMISRTPEVTCVVVDVSHEDPEVKFNWYVD | Clone CH3C.35.20.1 with |
| | GVEVHNAKTKPREEQYNSTYRVVSVLTVLHQDWLNGKEYKCKVSNKAL | hole and LALAPG |
| | GAPIEKTISKAKGQPREPQVYTLPPSRDELTKNQVSLSCAVKGFYPSDIAVE | mutations |
| | WESFGTEWSSYKTTPPVLDSDGSFFLVSKLTVTKEEWQQGFVFSCSVMHE | |
| | ALHNHYTQKSLSLSPGK | |
| 2276 | APELLGGPSVFLFPPKPKDTLYITREPEVTCVVVDVSHEDPEVKFNWYVDG | Clone CH3C.35.20.1 with |
| | VEVHNAKTKPREEQYNSTYRVVSVLTVLHQDWLNGKEYKCKVSNKALP | hole and YTE mutations |
| | APIEKTISKAKGQPREPQVYTLPPSRDELTKNQVSLSCAVKGFYPSDIAVEW | |
| | ESFGTEWSSYKTTPPVLDSDGSFFLVSKLTVTKEEWQQGFVFSCSVMHEAL | |
| | HNHYTQKSLSLSPGK | |
| 2277 | APEAAGGPSVFLFPPKPKDTLYITREPEVTCVVVDVSHEDPEVKFNWYVD | Clone CH3C.35.20.1 with |
| | GVEVHNAKTKPREEQYNSTYRVVSVLTVLHQDWLNGKEYKCKVSNKAL | hole, LALA, and YTE |
| | PAPIEKTISKAKGQPREPQVYTLPPSRDELTKNQVSLSCAVKGFYPSDIAVE | mutations |
| | WESFGTEWSSYKTTPPVLDSDGSFFLVSKLTVTKEEWQQGFVFSCSVMHE | |
| | ALHNHYTQKSLSLSPGK | |
| 2278 | APEAAGGPSVFLFPPKPKDTLYITREPEVTCVVVDVSHEDPEVKFNWYVD | Clone CH3C.35.20.1 with |
| | GVEVHNAKTKPREEQYNSTYRVVSVLTVLHQDWLNGKEYKCKVSNKAL | hole LALAPG, and YTE |
| | GAPIEKTISKAKGQPREPQVYTLPPSRDELTKNQVSLSCAVKGFYPSDIAVE | mutations |
| | WESFGTEWSSYKTTPPVLDSDGSFFLVSKLTVTKEEWQQGFVFSCSVMHE | |
| | ALHNHYTQKSLSLSPGK | |
| 2279 | APELLGGPSVFLFPPKPKDTLMISRTPEVTCVVVDVSHEDPEVKFNWYVDG | Clone CH3C.35.23.2 with |
| | VEVHNAKTKPREEQYNSTYRVVSVLTVLHQDWLNGKEYKCKVSNKALP | knob mutation |
| | APIEKTISKAKGQPREPQVYTLPPSRDELTKNQVSLWCLVKGFYPSDIAVE | |
| | WESYGTEWANYKTTPPVLDSDGSFFLYSKLTVTKEEWQQGFVFSCSVMH | |
| | EALHNHYTQKSLSLSPGK | |
| 2280 | APEAAGGPSVFLFPPKPKDTLMISRTPEVTCVVVDVSHEDPEVKFNWYVD | Clone CH3C.35.23.2 with |
| | GVEVHNAKTKPREEQYNSTYRVVSVLTVLHQDWLNGKEYKCKVSNKAL | knob and LALA mutations |
| | PAPIEKTISKAKGQPREPQVYTLPPSRDELTKNQVSLWCLVKGFYPSDIAVE | |
| | WESYGTEWANYKTTPPVLDSDGSFFLYSKLTVTKEEWQQGFVFSCSVMH | |
| | EALHNHYTQKSLSLSPGK | |
| 2281 | APEAAGGPSVFLFPPKPKDTLMISRTPEVTCVVVDVSHEDPEVKFNWYVD | Clone CH3C.35.23.2 with |
| | GVEVHNAKTKPREEQYNSTYRVVSVLTVLHQDWLNGKEYKCKVSNKAL | knob and LALAPG |
| | GAPIEKTISKAKGQPREPQVYTLPPSRDELTKNQVSLWCLVKGFYPSDIAV | mutations |
| | EWESYGTEWANYKTTPPVLDSDGSFFLYSKLTVTKEEWQQGFVFSCSVM | |
| | HEALHNHYTQKSLSLSPGK | |
| 2282 | APELLGGPSVFLFPPKPKDTLYITREPEVTCVVVDVSHEDPEVKFNWYVDG | Clone CH3C.35.23.2 with |
| | VEVHNAKTKPREEQYNSTYRVVSVLTVLHQDWLNGKEYKCKVSNKALP | knob and YTE mutations |
| | APIEKTISKAKGQPREPQVYTLPPSRDELTKNQVSLWCLVKGFYPSDIAVE | |
| | WESYGTEWANYKTTPPVLDSDGSFFLYSKLTVTKEEWQQGFVFSCSVMH | |
| | EALHNHYTQKSLSLSPGK | |
| 2283 | APEAAGGPSVFLFPPKPKDTLYITREPEVTCVVVDVSHEDPEVKFNWYVD | Clone CH3C.35.23.2 with |
| | GVEVHNAKTKPREEQYNSTYRVVSVLTVLHQDWLNGKEYKCKVSNKAL | knob, LALA, and YTE |
| | PAPIEKTISKAKGQPREPQVYTLPPSRDELTKNQVSLWCLVKGFYPSDIAVE | mutations |
| | WESYGTEWANYKTTPPVLDSDGSFFLYSKLTVTKEEWQQGFVFSCSVMH | |
| | EALHNHYTQKSLSLSPGK | |
| 2284 | APEAAGGPSVFLFPPKPKDTLYITREPEVTCVVVDVSHEDPEVKFNWYVD | Clone CH3C.35.23.2 with |
| | GVEVHNAKTKPREEQYNSTYRVVSVLTVLHQDWLNGKEYKCKVSNKAL | knob, LALAPG, and YTE |
| | GAPIEKTISKAKGQPREPQVYTLPPSRDELTKNQVSLWCLVKGFYPSDIAV | mutations |
| | EWESYGTEWANYKTTPPVLDSDGSFFLYSKLTVTKEEWQQGFVFSCSVM | |
| | HEALHNHYTQKSLSLSPGK | |
| 2285 | APELLGGPSVFLFPPKPKDTLMISRTPEVTCVVVDVSHEDPEVKFNWYVDG | Clone CH3C.35.23.2 with |
| | VEVHNAKTKPREEQYNSTYRVVSVLTVLHQDWLNGKEYKCKVSNKALP | hole mutations |
| | APIEKTISKAKGQPREPQVYTLPPSRDELTKNQVSLSCAVKGFYPSDIAVEW | |
| | ESYGTEWANYKTTPPVLDSDGSFFLVSKLTVTKEEWQQGFVFSCSVMHEA | |
| | LHNHYTQKSLSLSPGK | |
| 2286 | APEAAGGPSVFLFPPKPKDTLMISRTPEVTCVVVDVSHEDPEVKFNWYVD | Clone CH3C.35.23.2 with |
| | GVEVHNAKTKPREEQYNSTYRVVSVLTVLHQDWLNGKEYKCKVSNKAL | hole and LALA mutations |
| | PAPIEKTISKAKGQPREPQVYTLPPSRDELTKNQVSLSCAVKGFYPSDIAVE | |
| | WESYGTEWANYKTTPPVLDSDGSFFLVSKLTVTKEEWQQGFVFSCSVMH | |
| | EALHNHYTQKSLSLSPGK | |
| 2287 | APEAAGGPSVFLFPPKPKDTLMISRTPEVTCVVVDVSHEDPEVKFNWYVD | Clone CH3C.35.23.2 with |
| | GVEVHNAKTKPREEQYNSTYRVVSVLTVLHQDWLNGKEYKCKVSNKAL | hole and LALAPG |
| | GAPIEKTISKAKGQPREPQVYTLPPSRDELTKNQVSLSCAVKGFYPSDIAVE | mutations |
| | WESYGTEWANYKTTPPVLDSDGSFFLVSKLTVTKEEWQQGFVFSCSVMH | |
| | EALHNHYTQKSLSLSPGK | |
| 2288 | APELLGGPSVFLFPPKPKDTLYITREPEVTCVVVDVSHEDPEVKFNWYVDG | Clone CH3C.35.23.2 with |
| | VEVHNAKTKPREEQYNSTYRVVSVLTVLHQDWLNGKEYKCKVSNKALP | hole and YTE mutations |
| | APIEKTISKAKGQPREPQVYTLPPSRDELTKNQVSLSCAVKGFYPSDIAVEW | |
| | ESYGTEWANYKTTPPVLDSDGSFFLVSKLTVTKEEWQQGFVFSCSVMHEA | |
| | LHNHYTQKSLSLSPGK | |
| 2289 | APEAAGGPSVFLFPPKPKDTLYITREPEVTCVVVDVSHEDPEVKFNWYVD | Clone CH3C.35.23.2 with |
| | GVEVHNAKTKPREEQYNSTYRVVSVLTVLHQDWLNGKEYKCKVSNKAL | hole, LALA, and YTE |
| | PAPIEKTISKAKGQPREPQVYTLPPSRDELTKNQVSLSCAVKGFYPSDIAVE | mutations |
| | WESYGTEWANYKTTPPVLDSDGSFFLVSKLTVTKEEWQQGFVFSCSVMH | |
| | EALHNHYTQKSLSLSPGK | |
| 2290 | APEAAGGPSVFLFPPKPKDTLYITREPEVTCVVVDVSHEDPEVKFNWYVD | Clone CH3C.35.23.2 with |
| | GVEVHNAKTKPREEQYNSTYRVVSVLTVLHQDWLNGKEYKCKVSNKAL | hole, LALAPG, and YTE |
| | GAPIEKTISKAKGQPREPQVYTLPPSRDELTKNQVSLSCAVKGFYPSDIAVE | mutations |
| | WESYGTEWANYKTTPPVLDSDGSFFLVSKLTVTKEEWQQGFVFSCSVMH | |
| | EALHNHYTQKSLSLSPGK | |
| 2291 | APELLGGPSVFLFPPKPKDTLMISRTPEVTCVVVDVSHEDPEVKFNWYVDG | Clone CH3C.35.23.3 with |
| | VEVHNAKTKPREEQYNSTYRVVSVLTVLHQDWLNGKEYKCKVSNKALP | knob mutation |
| | APIEKTISKAKGQPREPQVYTLPPSRDELTKNQVSLWCLVKGFYPSDIAVE | |
| | WESYGTEWVNYKTTPPVLDSDGSFFLYSKLTVTKEEWQQGFVFSCSVMH | |
| | EALHNHYTQKSLSLSPGK | |
| 2292 | APEAAGGPSVFLFPPKPKDTLMISRTPEVTCVVVDVSHEDPEVKFNWYVD | Clone CH3C.35.23.3 with |
| | GVEVHNAKTKPREEQYNSTYRVVSVLTVLHQDWLNGKEYKCKVSNKAL | knob and LALA mutations |
| | PAPIEKTISKAKGQPREPQVYTLPPSRDELTKNQVSLWCLVKGFYPSDIAVE | |
| | WESYGTEWVNYKTTPPVLDSDGSFFLYSKLTVTKEEWQQGFVFSCSVMH | |
| | EALHNHYTQKSLSLSPGK | |
| 2293 | APEAAGGPSVFLFPPKPKDTLMISRTPEVTCVVVDVSHEDPEVKFNWYVD | Clone CH3C.35.23.3 with |
| | GVEVHNAKTKPREEQYNSTYRVVSVLTVLHQDWLNGKEYKCKVSNKAL | knob and LALAPG |
| | GAPIEKTISKAKGQPREPQVYTLPPSRDELTKNQVSLWCLVKGFYPSDIAV | mutations |
| | EWESYGTEWVNYKTTPPVLDSDGSFFLYSKLTVTKEEWQQGFVFSCSVM | |
| | HEALHNHYTQKSLSLSPGK | |
| 2294 | APELLGGPSVFLFPPKPKDTLYITREPEVTCVVVDVSHEDPEVKFNWYVDG | Clone CH3C.35.23.3 with |
| | VEVHNAKTKPREEQYNSTYRVVSVLTVLHQDWLNGKEYKCKVSNKALP | knob and YTE mutations |
| | APIEKTISKAKGQPREPQVYTLPPSRDELTKNQVSLWCLVKGFYPSDIAVE | |
| | WESYGTEWVNYKTTPPVLDSDGSFFLYSKLTVTKEEWQQGFVFSCSVMH | |
| | EALHNHYTQKSLSLSPGK | |
| 2295 | APEAAGGPSVFLFPPKPKDTLYITREPEVTCVVVDVSHEDPEVKFNWYVD | Clone CH3C.35.23.3 with |
| | GVEVHNAKTKPREEQYNSTYRVVSVLTVLHQDWLNGKEYKCKVSNKAL | knob, LALA, and YTE |
| | PAPIEKTISKAKGQPREPQVYTLPPSRDELTKNQVSLWCLVKGFYPSDIAVE | mutations |
| | WESYGTEWVNYKTTPPVLDSDGSFFLYSKLTVTKEEWQQGFVFSCSVMH | |
| | EALHNHYTQKSLSLSPGK | |
| 2296 | APEAAGGPSVFLFPPKPKDTLYITREPEVTCVVVDVSHEDPEVKFNWYVD | Clone CH3C.35.23.3 with |
| | GVEVHNAKTKPREEQYNSTYRVVSVLTVLHQDWLNGKEYKCKVSNKAL | knob, LALAPG, and YTE |
| | GAPIEKTISKAKGQPREPQVYTLPPSRDELTKNQVSLWCLVKGFYPSDIAV | mutations |
| | EWESYGTEWVNYKTTPPVLDSDGSFFLYSKLTVTKEEWQQGFVFSCSVM | |
| | HEALHNHYTQKSLSLSPGK | |
| 2297 | APELLGGPSVFLFPPKPKDTLMISRTPEVTCVVVDVSHEDPEVKFNWYVDG | Clone CH3C.35.23.3 with |
| | VEVHNAKTKPREEQYNSTYRVVSVLTVLHQDWLNGKEYKCKVSNKALP | hole mutations |
| | APIEKTISKAKGQPREPQVYTLPPSRDELTKNQVSLSCAVKGFYPSDIAVEW | |
| | ESYGTEWVNYKTTPPVLDSDGSFFLVSKLTVTKEEWQQGFVFSCSVMHEA | |
| | LHNHYTQKSLSLSPGK | |
| 2298 | APEAAGGPSVFLFPPKPKDTLMISRTPEVTCVVVDVSHEDPEVKFNWYVD | Clone CH3C.35.23.3 with |
| | GVEVHNAKTKPREEQYNSTYRVVSVLTVLHQDWLNGKEYKCKVSNKAL | hole and LALA mutations |
| | PAPIEKTISKAKGQPREPQVYTLPPSRDELTKNQVSLSCAVKGFYPSDIAVE | |
| | WESYGTEWVNYKTTPPVLDSDGSFFLVSKLTVTKEEWQQGFVFSCSVMH | |
| | EALHNHYTQKSLSLSPGK | |
| 2299 | APEAAGGPSVFLFPPKPKDTLMISRTPEVTCVVVDVSHEDPEVKFNWYVD | Clone CH3C.35.23.3 with |
| | GVEVHNAKTKPREEQYNSTYRVVSVLTVLHQDWLNGKEYKCKVSNKAL | hole and LALAPG |
| | GAPIEKTISKAKGQPREPQVYTLPPSRDELTKNQVSLSCAVKGFYPSDIAVE | mutations |
| | WESYGTEWVNYKTTPPVLDSDGSFFLVSKLTVTKEEWQQGFVFSCSVMH | |
| | EALHNHYTQKSLSLSPGK | |
| 2300 | APELLGGPSVFLFPPKPKDTLYITREPEVTCVVVDVSHEDPEVKFNWYVDG | Clone CH3C.35.23.3 with |
| | VEVHNAKTKPREEQYNSTYRVVSVLTVLHQDWLNGKEYKCKVSNKALP | hole and YTE mutations |
| | APIEKTISKAKGQPREPQVYTLPPSRDELTKNQVSLSCAVKGFYPSDIAVEW | |
| | ESYGTEWVNYKTTPPVLDSDGSFFLVSKLTVTKEEWQQGFVFSCSVMHEA | |
| | LHNHYTQKSLSLSPGK | |
| 2301 | APEAAGGPSVFLFPPKPKDTLYITREPEVTCVVVDVSHEDPEVKFNWYVD | Clone CH3C.35.23.3 with |
| | GVEVHNAKTKPREEQYNSTYRVVSVLTVLHQDWLNGKEYKCKVSNKAL | hole, LALA, and YTE |
| | PAPIEKTISKAKGQPREPQVYTLPPSRDELTKNQVSLSCAVKGFYPSDIAVE | mutations |
| | WESYGTEWVNYKTTPPVLDSDGSFFLVSKLTVTKEEWQQGFVFSCSVMH | |
| | EALHNHYTQKSLSLSPGK | |
| 2302 | APEAAGGPSVFLFPPKPKDTLYITREPEVTCVVVDVSHEDPEVKFNWYVD | Clone CH3C.35.23.3 with |
| | GVEVHNAKTKPREEQYNSTYRVVSVLTVLHQDWLNGKEYKCKVSNKAL | hole, LALAPG, and YTE |
| | GAPIEKTISKAKGQPREPQVYTLPPSRDELTKNQVSLSCAVKGFYPSDIAVE | mutations |
| | WESYGTEWVNYKTTPPVLDSDGSFFLVSKLTVTKEEWQQGFVFSCSVMH | |
| | EALHNHYTQKSLSLSPGK | |
| 2303 | APELLGGPSVFLFPPKPKDTLMISRTPEVTCVVVDVSHEDPEVKFNWYVDG | Clone CH3C.35.23.4 with |
| | VEVHNAKTKPREEQYNSTYRVVSVLTVLHQDWLNGKEYKCKVSNKALP | knob mutation |
| | APIEKTISKAKGQPREPQVYTLPPSRDELTKNQVSLWCLVKGFYPSDIAVE | |
| | WESYGTEWSNYKTTPPVLDSDGSFFLYSKLTVSKEEWQQGFVFSCSVMHE | |
| | ALHNHYTQKSLSLSPGK | |
| 2304 | APEAAGGPSVFLFPPKPKDTLMISRTPEVTCVVVDVSHEDPEVKFNWYVD | Clone CH3C.35.23.4 with |
| | GVEVHNAKTKPREEQYNSTYRVVSVLTVLHQDWLNGKEYKCKVSNKAL | knob and LALA mutations |
| | PAPIEKTISKAKGQPREPQVYTLPPSRDELTKNQVSLWCLVKGFYPSDIAVE | |
| | WESYGTEWSNYKTTPPVLDSDGSFFLYSKLTVSKEEWQQGFVFSCSVMHE | |
| | ALHNHYTQKSLSLSPGK | |
| 2305 | APEAAGGPSVFLFPPKPKDTLMISRTPEVTCVVVDVSHEDPEVKFNWYVD | Clone CH3C.35.23.4 with |
| | GVEVHNAKTKPREEQYNSTYRVVSVLTVLHQDWLNGKEYKCKVSNKAL | knob and LALAPG |
| | GAPIEKTISKAKGQPREPQVYTLPPSRDELTKNQVSLWCLVKGFYPSDIAV | mutations |
| | EWESYGTEWSNYKTTPPVLDSDGSFFLYSKLTVSKEEWQQGFVFSCSVMH | |
| | EALHNHYTQKSLSLSPGK | |
| 2306 | APELLGGPSVFLFPPKPKDTLYITREPEVTCVVVDVSHEDPEVKFNWYVDG | Clone CH3C.35.23.4 with |
| | VEVHNAKTKPREEQYNSTYRVVSVLTVLHQDWLNGKEYKCKVSNKALP | aknob nd YTE mutations |
| | APIEKTISKAKGQPREPQVYTLPPSRDELTKNQVSLWCLVKGFYPSDIAVE | |
| | WESYGTEWSNYKTTPPVLDSDGSFFLYSKLTVSKEEWQQGFVFSCSVMHE | |
| | ALHNHYTQKSLSLSPGK | |
| 2307 | APEAAGGPSVFLEPPKPKDTLYITREPEVTCVVVDVSHEDPEVKFNWYVD | Clone CH3C.35.23.4 with |
| | GVEVHNAKTKPREEQYNSTYRVVSVLTVLHQDWLNGKEYKCKVSNKAL | knob, LALA, and YTE |
| | PAPIEKTISKAKGQPREPQVYTLPPSRDELTKNQVSLWCLVKGFYPSDIAVE | mutations |
| | WESYGTEWSNYKTTPPVLDSDGSFFLYSKLTVSKEEWQQGFVFSCSVMHE | |
| | ALHNHYTQKSLSLSPGK | |
| 2308 | APEAAGGPSVFLEPPKPKDTLYITREPEVTCVVVDVSHEDPEVKFNWYVD | Clone CH3C.35.23.4 with |
| | GVEVHNAKTKPREEQYNSTYRVVSVLTVLHQDWLNGKEYKCKVSNKAL | knob, LALAPG, and YTE |
| | GAPIEKTISKAKGQPREPQVYTLPPSRDELTKNQVSLWCLVKGFYPSDIAV | mutations |
| | EWESYGTEWSNYKTTPPVLDSDGSFFLYSKLTVSKEEWQQGFVFSCSVMH | |
| | EALHNHYTQKSLSLSPGK | |
| 2309 | APELLGGPSVFLEPPKPKDTLMISRTPEVTCVVVDVSHEDPEVKFNWYVDG | Clone CH3C.35.23.4 with |
| | VEVHNAKTKPREEQYNSTYRVVSVLTVLHQDWLNGKEYKCKVSNKALP | hole mutations |
| | APIEKTISKAKGQPREPQVYTLPPSRDELTKNQVSLSCAVKGFYPSDIAVEW | |
| | ESYGTEWSNYKTTPPVLDSDGSFFLVSKLTVSKEEWQQGFVFSCSVMHEA | |
| | LHNHYTQKSLSLSPGK | |
| 2310 | APEAAGGPSVFLEPPKPKDTLMISRTPEVTCVVVDVSHEDPEVKFNWYVD | Clone CH3C.35.23.4 with |
| | GVEVHNAKTKPREEQYNSTYRVVSVLTVLHQDWLNGKEYKCKVSNKAL | hole and LALA mutations |
| | PAPIEKTISKAKGQPREPQVYTLPPSRDELTKNQVSLSCAVKGFYPSDIAVE | |
| | WESYGTEWSNYKTTPPVLDSDGSFFLVSKLTVSKEEWQQGFVFSCSVMHE | |
| | ALHNHYTQKSLSLSPGK | |
| 2311 | APEAAGGPSVFLEPPKPKDTLMISRTPEVTCVVVDVSHEDPEVKFNWYVD | Clone CH3C.35.23.4 with |
| | GVEVHNAKTKPREEQYNSTYRVVSVLTVLHQDWLNGKEYKCKVSNKAL | hole and LALAPG |
| | GAPIEKTISKAKGQPREPQVYTLPPSRDELTKNQVSLSCAVKGFYPSDIAVE | mutations |
| | WESYGTEWSNYKTTPPVLDSDGSFFLVSKLTVSKEEWQQGFVFSCSVMHE | |
| | ALHNHYTQKSLSLSPGK | |
| 2312 | APELLGGPSVFLEPPKPKDTLYITREPEVTCVVVDVSHEDPEVKFNWYVDG | Clone CH3C.35.23.4 with |
| | VEVHNAKTKPREEQYNSTYRVVSVLTVLHQDWLNGKEYKCKVSNKALP | hole and YTE mutations |
| | APIEKTISKAKGQPREPQVYTLPPSRDELTKNQVSLSCAVKGFYPSDIAVEW | |
| | ESYGTEWSNYKTTPPVLDSDGSFFLVSKLTVSKEEWQQGFVFSCSVMHEA | |
| | LHNHYTQKSLSLSPGK | |
| 2313 | APEAAGGPSVFLEPPKPKDTLYITREPEVTCVVVDVSHEDPEVKFNWYVD | Clone CH3C.35.23.4 with |
| | GVEVHNAKTKPREEQYNSTYRVVSVLTVLHQDWLNGKEYKCKVSNKAL | hole, LALA, and YTE |
| | PAPIEKTISKAKGQPREPQVYTLPPSRDELTKNQVSLSCAVKGFYPSDIAVE | mutations |
| | WESYGTEWSNYKTTPPVLDSDGSFFLVSKLTVSKEEWQQGFVFSCSVMHE | |
| | ALHNHYTQKSLSLSPGK | |
| 2314 | APEAAGGPSVFLEPPKPKDTLYITREPEVTCVVVDVSHEDPEVKFNWYVD | Clone CH3C.35.23.4 with |
| | GVEVHNAKTKPREEQYNSTYRVVSVLTVLHQDWLNGKEYKCKVSNKAL | hole, LALAPG, and YTE |
| | GAPIEKTISKAKGQPREPQVYTLPPSRDELTKNQVSLSCAVKGFYPSDIAVE | mutations |
| | WESYGTEWSNYKTTPPVLDSDGSFFLVSKLTVSKEEWQQGFVFSCSVMHE | |
| | ALHNHYTQKSLSLSPGK | |
| 2315 | APELLGGPSVFLEPPKPKDTLMISRTPEVTCVVVDVSHEDPEVKFNWYVDG | Clone CH3C.35.21.17.2 |
| | VEVHNAKTKPREEQYNSTYRVVSVLTVLHQDWLNGKEYKCKVSNKALP | with knob mutation |
| | APIEKTISKAKGQPREPQVYTLPPSRDELTKNQVSLWCLVKGFYPSDIAVL | |
| | WESYGTEWASYKTTPPVLDSDGSFFLYSKLTVTKEEWQQGFVFSCSVMHE | |
| | ALHNHYTQKSLSLSPGK | |
| 2316 | APEAAGGPSVFLEPPKPKDTLMISRTPEVTCVVVDVSHEDPEVKFNWYVD | Clone CH3C.35.21.17.2 |
| | GVEVHNAKTKPREEQYNSTYRVVSVLTVLHQDWLNGKEYKCKVSNKAL | with knob and LALA |
| | PAPIEKTISKAKGQPREPQVYTLPPSRDELTKNQVSLWCLVKGFYPSDIAVL | mutations |
| | WESYGTEWASYKTTPPVLDSDGSFFLYSKLTVTKEEWQQGFVFSCSVMHE | |
| | ALHNHYTQKSLSLSPGK | |
| 2317 | APEAAGGPSVFLFPPKPKDTLMISRTPEVTCVVVDVSHEDPEVKFNWYVD | Clone CH3C.35.21.17.2 |
| | GVEVHNAKTKPREEQYNSTYRVVSVLTVLHQDWLNGKEYKCKVSNKAL | with knob and LALAPG |
| | GAPIEKTISKAKGQPREPQVYTLPPSRDELTKNQVSLWCLVKGFYPSDIAV | mutations |
| | LWESYGTEWASYKTTPPVLDSDGSFFLYSKLTVTKEEWQQGFVFSCSVMH | |
| | EALHNHYTQKSLSLSPGK | |
| 2318 | APELLGGPSVFLFPPKPKDTLYITREPEVTCVVVDVSHEDPEVKFNWYVDG | Clone CH3C.35.21.17.2 |
| | VEVHNAKTKPREEQYNSTYRVVSVLTVLHQDWLNGKEYKCKVSNKALP | with knob and YTE |
| | APIEKTISKAKGQPREPQVYTLPPSRDELTKNQVSLWCLVKGFYPSDIAVL | mutations |
| | WESYGTEWASYKTTPPVLDSDGSFFLYSKLTVTKEEWQQGFVFSCSVMHE | |
| | ALHNHYTQKSLSLSPGK | |
| 2319 | APEAAGGPSVFLFPPKPKDTLYITREPEVTCVVVDVSHEDPEVKFNWYVD | Clone CH3C.35.21.17.2 |
| | GVEVHNAKTKPREEQYNSTYRVVSVLTVLHQDWLNGKEYKCKVSNKAL | with knob, LALA, and |
| | PAPIEKTISKAKGQPREPQVYTLPPSRDELTKNQVSLWCLVKGFYPSDIAVL | YTE mutations |
| | WESYGTEWASYKTTPPVLDSDGSFFLYSKLTVTKEEWQQGFVFSCSVMHE | |
| | ALHNHYTQKSLSLSPGK | |
| 2320 | APEAAGGPSVFLFPPKPKDTLYITREPEVTCVVVDVSHEDPEVKFNWYVD | Clone CH3C.35.21.17.2 |
| | GVEVHNAKTKPREEQYNSTYRVVSVLTVLHQDWLNGKEYKCKVSNKAL | with knob, LALAPG, and |
| | GAPIEKTISKAKGQPREPQVYTLPPSRDELTKNQVSLWCLVKGFYPSDIAV | YTE mutations |
| | LWESYGTEWASYKTTPPVLDSDGSFFLYSKLTVTKEEWQQGFVFSCSVMH | |
| | EALHNHYTQKSLSLSPGK | |
| 2321 | APELLGGPSVFLFPPKPKDTLMISRTPEVTCVVVDVSHEDPEVKFNWYVDG | Clone CH3C.35.21.17.2 |
| | VEVHNAKTKPREEQYNSTYRVVSVLTVLHQDWLNGKEYKCKVSNKALP | with hole mutations |
| | APIEKTISKAKGQPREPQVYTLPPSRDELTKNQVSLSCAVKGFYPSDIAVLW | |
| | ESYGTEWASYKTTPPVLDSDGSFFLVSKLTVTKEEWQQGFVFSCSVMHEA | |
| | LHNHYTQKSLSLSPGK | |
| 2322 | APEAAGGPSVFLFPPKPKDTLMISRTPEVTCVVVDVSHEDPEVKFNWYVD | Clone CH3C.35.21.17.2 |
| | GVEVHNAKTKPREEQYNSTYRVVSVLTVLHQDWLNGKEYKCKVSNKAL | with hole and LALA |
| | PAPIEKTISKAKGQPREPQVYTLPPSRDELTKNQVSLSCAVKGFYPSDIAVL | mutations |
| | WESYGTEWASYKTTPPVLDSDGSFFLVSKLTVTKEEWQQGFVFSCSVMHE | |
| | ALHNHYTQKSLSLSPGK | |
| 2323 | APEAAGGPSVFLFPPKPKDTLMISRTPEVTCVVVDVSHEDPEVKFNWYVD | Clone CH3C.35.21.17.2 |
| | GVEVHNAKTKPREEQYNSTYRVVSVLTVLHQDWLNGKEYKCKVSNKAL | with hole and LALAPG |
| | GAPIEKTISKAKGQPREPQVYTLPPSRDELTKNQVSLSCAVKGFYPSDIAVL | mutations |
| | WESYGTEWASYKTTPPVLDSDGSFFLVSKLTVTKEEWQQGFVFSCSVMHE | |
| | ALHNHYTQKSLSLSPGK | |
| 2324 | APELLGGPSVFLFPPKPKDTLYITREPEVTCVVVDVSHEDPEVKFNWYVDG | Clone CH3C.35.21.17.2 |
| | VEVHNAKTKPREEQYNSTYRVVSVLTVLHQDWLNGKEYKCKVSNKALP | with hole and YTE |
| | APIEKTISKAKGQPREPQVYTLPPSRDELTKNQVSLSCAVKGFYPSDIAVLW | mutations |
| | ESYGTEWASYKTTPPVLDSDGSFFLVSKLTVTKEEWQQGFVFSCSVMHEA | |
| | LHNHYTQKSLSLSPGK | |
| 2325 | APEAAGGPSVFLFPPKPKDTLYITREPEVTCVVVDVSHEDPEVKFNWYVD | Clone CH3C.35.21.17.2 |
| | GVEVHNAKTKPREEQYNSTYRVVSVLTVLHQDWLNGKEYKCKVSNKAL | with hole, LALA, and |
| | PAPIEKTISKAKGQPREPQVYTLPPSRDELTKNQVSLSCAVKGFYPSDIAVL | YTE mutations |
| | WESYGTEWASYKTTPPVLDSDGSFFLVSKLTVTKEEWQQGFVFSCSVMHE | |
| | ALHNHYTQKSLSLSPGK | |
| 2326 | APEAAGGPSVFLFPPKPKDTLYITREPEVTCVVVDVSHEDPEVKFNWYVD | Clone CH3C.35.21.17.2 |
| | GVEVHNAKTKPREEQYNSTYRVVSVLTVLHQDWLNGKEYKCKVSNKAL | with hole, LALAPG, |
| | GAPIEKTISKAKGQPREPQVYTLPPSRDELTKNQVSLSCAVKGFYPSDIAVL | and YTE mutations |
| | WESYGTEWASYKTTPPVLDSDGSFFLVSKLTVTKEEWQQGFVFSCSVMHE | |
| | ALHNHYTQKSLSLSPGK | |
| 2327 | APELLGGPSVFLFPPKPKDTLMISRTPEVTCVVVDVSHEDPEVKFNWYVDG | |
| | VEVHNAKTKPREEQYNSTYRVVSVLTVLHQDWLNGKEYKCKVSNKALP | Clone CH3C.35.23 with |
| | APIEKTISKAKGQPREPQVYTLPPSRDELTKNQVSLWCLVKGFYPSDIAVE | knob mutation |
| | WESYGTEWSNYKTTPPVLDSDGSFFLYSKLTVTKEEWQQGFVFSCSVMHE | |
| | ALHNHYTQKSLSLSPGK | |
| 2328 | APEAAGGPSVFLFPPKPKDTLMISRTPEVTCVVVDVSHEDPEVKFNWYVD | |
| | GVEVHNAKTKPREEQYNSTYRVVSVLTVLHQDWLNGKEYKCKVSNKAL | Clone CH3C.35.23 with |
| | PAPIEKTISKAKGQPREPQVYTLPPSRDELTKNQVSLWCLVKGFYPSDIAVE | knob and LALA |
| | WESYGTEWSNYKTTPPVLDSDGSFFLYSKLTVTKEEWQQGFVFSCSVMHE | mutations |
| | ALHNHYTQKSLSLSPGK | |
| 2329 | APEAAGGPSVFLFPPKPKDTLMISRTPEVTCVVVDVSHEDPEVKFNWYVD | |
| | GVEVHNAKTKPREEQYNSTYRVVSVLTVLHQDWLNGKEYKCKVSNKAL | Clone CH3C.35.23 with |
| | GAPIEKTISKAKGQPREPQVYTLPPSRDELTKNQVSLWCLVKGFYPSDIAV | knob and LALAPG |
| | EWESYGTEWSNYKTTPPVLDSDGSFFLYSKLTVTKEEWQQGFVFSCSVMH | mutations |
| | EALHNHYTQKSLSLSPGK | |
| 2330 | APELLGGPSVFLFPPKPKDTLYITREPEVTCVVVDVSHEDPEVKFNWYVDG | |
| | VEVHNAKTKPREEQYNSTYRVVSVLTVLHQDWLNGKEYKCKVSNKALP | Clone CH3C.35.23 with |
| | APIEKTISKAKGQPREPQVYTLPPSRDELTKNQVSLWCLVKGFYPSDIAVE | knob and YTE |
| | WESYGTEWSNYKTTPPVLDSDGSFFLYSKLTVTKEEWQQGFVFSCSVMHE | mutations |
| | ALHNHYTQKSLSLSPGK | |
| 2331 | APEAAGGPSVFLFPPKPKDTLYITREPEVTCVVVDVSHEDPEVKFNWYVD | |
| | GVEVHNAKTKPREEQYNSTYRVVSVLTVLHQDWLNGKEYKCKVSNKAL | Clone CH3C.35.23 with |
| | PAPIEKTISKAKGQPREPQVYTLPPSRDELTKNQVSLWCLVKGFYPSDIAVE | knob, LALA, and YTE |
| | WESYGTEWSNYKTTPPVLDSDGSFFLYSKLTVTKEEWQQGFVFSCSVMHE | mutations |
| | ALHNHYTQKSLSLSPGK | |
| 2332 | APEAAGGPSVFLFPPKPKDTLYITREPEVTCVVVDVSHEDPEVKFNWYVD | |
| | GVEVHNAKTKPREEQYNSTYRVVSVLTVLHQDWLNGKEYKCKVSNKAL | Clone CH3C.35.23 with |
| | GAPIEKTISKAKGQPREPQVYTLPPSRDELTKNQVSLWCLVKGFYPSDIAV | knob, LALAPG, and YTE |
| | EWESYGTEWSNYKTTPPVLDSDGSFFLYSKLTVTKEEWQQGFVFSCSVMH | mutations |
| | EALHNHYTQKSLSLSPGK | |
| 2333 | APELLGGPSVFLFPPKPKDTLMISRTPEVTCVVVDVSHEDPEVKFNWYVDG | |
| | VEVHNAKTKPREEQYNSTYRVVSVLTVLHQDWLNGKEYKCKVSNKALP | Clone CH3C.35.23 with |
| | APIEKTISKAKGQPREPQVYTLPPSRDELTKNQVSLSCAVKGFYPSDIAVEW | hole mutations |
| | ESYGTEWSNYKTTPPVLDSDGSFFLVSKLTVTKEEWQQGFVFSCSVMHEA | |
| | LHNHYTQKSLSLSPGK | |
| 2334 | APEAAGGPSVFLFPPKPKDTLMISRTPEVTCVVVDVSHEDPEVKFNWYVD | |
| | GVEVHNAKTKPREEQYNSTYRVVSVLTVLHQDWLNGKEYKCKVSNKAL | Clone CH3C.35.23 with |
| | PAPIEKTISKAKGQPREPQVYTLPPSRDELTKNQVSLSCAVKGFYPSDIAVE | hole and LALA |
| | WESYGTEWSNYKTTPPVLDSDGSFFLVSKLTVTKEEWQQGFVFSCSVMHE | mutations |
| | ALHNHYTQKSLSLSPGK | |
| 2335 | APEAAGGPSVFLFPPKPKDTLMISRTPEVTCVVVDVSHEDPEVKFNWYVD | Clone CH3C.35.23 with |
| | GVEVHNAKTKPREEQYNSTYRVVSVLTVLHQDWLNGKEYKCKVSNKAL | hole and LALAPG |
| | GAPIEKTISKAKGQPREPQVYTLPPSRDELTKNQVSLSCAVKGFYPSDIAVE | mutations |
| | WESYGTEWSNYKTTPPVLDSDGSFFLVSKLTVTKEEWQQGFVFSCSVMHE | |
| | ALHNHYTQKSLSLSPGK | |
| 2336 | APELLGGPSVFLFPPKPKDTLYITREPEVTCVVVDVSHEDPEVKFNWYVDG | Clone CH3C.35.23 with |
| | VEVHNAKTKPREEQYNSTYRVVSVLTVLHQDWLNGKEYKCKVSNKALP | hole and YTE |
| | APIEKTISKAKGQPREPQVYTLPPSRDELTKNQVSLSCAVKGFYPSDIAVEW | mutations |
| | ESYGTEWSNYKTTPPVLDSDGSFFLVSKLTVTKEEWQQGFVFSCSVMHEA | |
| | LHNHYTQKSLSLSPGK | |
| 2337 | APEAAGGPSVFLFPPKPKDTLYITREPEVTCVVVDVSHEDPEVKFNWYVD | Clone CH3C.35.23 with |
| | GVEVHNAKTKPREEQYNSTYRVVSVLTVLHQDWLNGKEYKCKVSNKAL | hole, LALA, and YTE |
| | PAPIEKTISKAKGQPREPQVYTLPPSRDELTKNQVSLSCAVKGFYPSDIAVE | mutations |
| | WESYGTEWSNYKTTPPVLDSDGSFFLVSKLTVTKEEWQQGFVFSCSVMHE | |
| | ALHNHYTQKSLSLSPGK | |
| 2338 | APEAAGGPSVFLFPPKPKDTLYITREPEVTCVVVDVSHEDPEVKFNWYVD | Clone CH3C.35.23 with |
| | GVEVHNAKTKPREEQYNSTYRVVSVLTVLHQDWLNGKEYKCKVSNKAL | hole, LALAPG, and YTE |
| | GAPIEKTISKAKGQPREPQVYTLPPSRDELTKNQVSLSCAVKGFYPSDIAVE | mutations |
| | WESYGTEWSNYKTTPPVLDSDGSFFLVSKLTVTKEEWQQGFVFSCSVMHE | |
| | ALHNHYTQKSLSLSPGK | |
| 2339 | YxTEWSS | CH3C motif |
| 2340 | TxxExxxxF | CH3C motif |
| 2341 | GGACAGGGATCCAGAGTTCC | mulgGI 3′ VH PCR primer |
| 2342 | AGCTGGGAAGGTGTGCACAC | mu3/4G2 3′ VH PCR |
| | | primer |
| 2343 | CAGGGGCCAGTGGATAGAC | mu3/4G3 3′ VH PCR |
| | | primer |
| 2344 | GACATTGATGTCTTTGGGGT | muCkappa.1 3′ VL PCR |
| | | primer |
| 2345 | TTCACTGCCATCAATCTTCC | muCkappa.2 3′ VL PCR |
| | | primer |
| 2346 | EVQLQQSGPELVKPGASVKMSCKASGYTFTDYNMHWVKQSHGKSLEWIG | 7B10.A2 VH amino acid |
| | YINPNNGGTTYNQKFKGKATLTVNKSSSTAYMELRSLTSEDSAVYYCATY | sequence |
| | NNHYFDSWGQGTTLTVSS | |
| 2347 | GYTFTDYNMH | 7B10.A2 CDR-H1 |
| 2348 | YINPNNGGTTYNQKFKG | 7B10.A2 CDR-H2 |
| 2349 | ATYNNHYFDS | 7B10.A2 CDR-H3 |
| 2350 | DIQMTQTTSSLSASLGDRVTISCSASQGISNYLNWYQQKPDGTVKLLIYYT | 7B10.A2 VL amino acid |
| | SNLHSGVPSRFSGSGSGTDYSLTISNLEPEDIATYYCQQYSNLPYTFGGGTK | sequence |
| | LEIK | |
| 2351 | SASQGISNYLN | 7B10.A2 CDR-L1 |
| 2352 | YTSNLHS | 7B10.A2 CDR-L2 |
| 2353 | QQYSNLPYT | 7B10.A2 CDR-L3 |
| 2354 | QVHLQQSGPEVVRPGVSVKISCKGSGYTFTDYGMHWVKQSHAKSLEWIG | 51D4 VH amino acid |
| | VISTYNGNTSYNQKYKGKATVTVDKPSSTAYMELVRLTSEDSAIYYCARD | sequence |
| | FGYVPFDYWGQGTTLTVSS | |
| 2355 | GYTFTDYGMH | 51D4 CDR-H1 |
| 2356 | VISTYNGNTSYNQKYKG | 51D4 CDR-H2 |
| 2357 | ARDFGYVPFDY | 51D4 CDR-H3 |
| 2358 | DVVMTQTPLTLSVTIGQPASISCKSSQSLLDSDGKTYLNWLLQRP | 51D4 VL amino acid |
| | GQSPKRLIYLVSYLDSGVPDRFTGSGSGTDFTLKISRVEADDLGV | sequence |
| | YYCWQGTHFPYTFGGGTKLEIK | |
| 2359 | LVSYLDS | 51D4 CDR-L2 |
| 2360 | GX₂X₃X₄X₅X₆X₇X₈X₉X₁₀X₁₁, wherein X₂ is Y or F; | CDR-H1 consensus |
| | X₃ is T, N, or S; X₄ is F, L, or I; X₅ is T, S, | sequence |
| | or K; X₆ is D, S, or E; X₇ is D or absent; X₈ | |
| | is H, Y, or T; X₉ is A, N, G, V, W, T, or Y; | |
| | X₁₀ is M, I, or W; and X is H, Q, or N | |
| 2361 | GYX₃X₄X₅X₆X₇X₈X₉X₁₀X₁₁, wherein X₃ is T or S; | CDR-H1 consensus |
| | X₄ is F, L, or I; X₅ is T or S; X₆ is D, S, | sequence |
| | or E; X₇ is D or absent; X₈ is H or Y; X₉ is | |
| | A, N, G, V, W, T, or A; X₁₀ is M, I, or W; | |
| | and X₁₁ is H, Q, or N | |
| 2362 | GX₂X₃X₄X₅X₆X₈X₉X₁₀X₁₁, wherein X is Y or F; | CDR-H1 consensus |
| | X₃ is T or N; X₄ is F, L, or I; X is T, S, | sequence |
| | or K; X₆ is D, S, or E; X₈ is H, Y, or T; | |
| | X is A, N, G, V, W, T, Y, or A; Xi is M or | |
| | I; and X is H or Q | |
| 2363 | GYTX₄X₅X₆X₈X₉X₁₀X₁₁, wherein X₄ is F or L; | CDR-H1 consensus |
| | X is T or S; X₆ is D, S, or E; X₈ is H, Y; | sequence |
| | X₉ is A, N, G, V, W, T; X₁₀ is M or I; and | |
| | X₁₁ is H or Q | |
| 2364 | X₁X₂X₃X₄X₅X₆X₇X₈X₉X₁₀YX₁₂X₁₃X₁₄X₁₅X₁₆X₁₇, | CDR-H2 consensus |
| | wherein X₁ is D, V, Y, R, G, or T; X₂ is | sequence |
| | I, S, or V; X₃ is L, S, N, D, I, or Y; X₄ | |
| | is P, T, or absent; X₅ is S, Y, N, T, A, | |
| | G, or F; X₆ is I, S, N, T, or D; X₇ is G | |
| | or D; X₈ is G, D, N, R, or S; X₉ is R, T, | |
| | or A; X₁₀ is I, G, S, K, T, N, or R; X₁₂ | |
| | is G, N, D, or T; X₁₃ is V, Q, E, or P; | |
| | X₁₄ is K or S; X₁₅ is F, Y or L; X₁₆ is K, | |
| | R, Q, or is absent; and X₁₇ is G, T, D, S, | |
| | or is absent | |
| 2365 | X₁X₂X₃X₄X₅X₆X₇X₈X₉X₁₀YX₁₂X₁₃X₁₄X₁₅X₁₆X₁₇, | CDR-H2 consensus |
| | wherein X₁ is V, Y, R, G, or T; X₂ is I, | sequence |
| | S, or V; X₃ is S, N, D, I, or Y; X₄ is P, | |
| | T, or absent; X₅ is Y, N, T, A, G, or F; | |
| | X₆ is S, N, T, or D; X₇ is G or D; X₈ is | |
| | G, D, N, R, or S; X₉ is T, or A; X₁₀ is | |
| | I, G, S, K, T, N, or R; X₁₂ is N, D, or | |
| | T; X₁₃ is Q, E, or P; X₁₄ is K or S; X₁₅ | |
| | is F, Y or L; X₁₆ is K, R, or Q; and Xi | |
| | is G, T, D, or S | |
| 2366 | X₁X₂X₃X₄X₅X₆X₇X₈X₉X₁₀YX₁₂X₁₃KX₁₅X₁₆X₁₇, | CDR-H2 consensus |
| | wherein X₁ is V, Y, R, G, or T; X₂ is I, | sequence |
| | S, or V; X₃ is S, N, D, I, or Y; X₄ is P | |
| | or T; X₅ is Y, N, T, A, or G; X₆ is S, N, | |
| | T, or D; X₇ is G or D; X₈ is G, D, or N; | |
| | X₉ is T, or A; X₁₀ is G, S, K, T, N, or | |
| | R; X₁₂ is N, D, or T; X₁₃ is Q, E, or P; | |
| | X₁₅ is F or Y; X₁₆ is K, R, or Q; and X₁₇ | |
| | is G, T, or D | |
| 2367 | ARX₃X₄X₅X₆X₇X₈X₉X₁₀YAX₁₃DY, wherein X₃ is | CDR-H3 consensus |
| | G or N; X₄ is D or G; X₅ is D or I; X₆ is | sequence |
| | S or T; X₇ is Y or T; X₈ is R or A; X₉ is | |
| | R or G; X₁₀ is G or Y; and X₁₃ is L or M | |
| 2368 | X₁SSX₄SLX₇X₈X₉X₁₀X₁₁X₁₂X₁₃X₁₄X₁₅LX₁₇, | CDR-L1 consensus |
| | wherein X₁ is R or K; X₄ is Q or K; X₇ is | sequence |
| | V or L; X₈ is H, D, or Y; X₉ is I, N, or | |
| | S; X₁₀ is S or absent; X₁₁ is D or N; X₁₂ | |
| | is G or Q; X₁₃ is N, I, or K; X₁₄ is T or | |
| | S; X₁₅ is Y or F; and X₁₇ is Q, H, Y, N, | |
| | or A | |
| 2369 | X₁ASX₄X₅IX₇X₈X₉LX₁₁, wherein X₁ is R, K, | CDR-L1 consensus |
| | or S; X₄ is E or Q; X₅ is N, D, or G; X₇ | sequence |
| | is Y or S; X₈ is S or N; X₉ is N, R, or | |
| | Y; and X₁₁ is A or N | |
| 2370 | X₁X₂SX₄X₅X₆S, wherein X₁ is K, Q, Y, V, | CDR-L2 consensus |
| | or L; X₂ is V, M, or T; X₄ is N, K, or Y; | sequence |
| | X₅ is R or L; and X₆ is F, A, H, or D | |
| 2371 | X₁X₂X₃X₄X₅X₆X₇X₈T, wherein X₁ is S, W, or | CDR-L3 consensus |
| | Q; X₂ is Q or H; X₃ is S, T, G, Y, or F; | sequence |
| | X₄ is T, F, W, S; X₅ is H, S, G, or N; X₆ | |
| | is V, A, F, Y, T, or L; X₇ is P, T, or L; | |
| | and X₈ is Y, F, P, or W | |
| 2372 | QX₂X₃X₄X₅X₆PX₈T, wherein X₂ is Q or H; X₃ | CDR-L3 consensus |
| | is Y or F; X₄ is F, W, or S; X₅ is S, G, | sequence |
| | or N; X₆ is Y, T, or L; and X₈ is P, Y, | |
| | or W | |
| 2373 | SGAHNTTVFQGVAGQSLQVSCPYDSMKHWGRRKAWCRQLGEK | Human TREM2 extracel- |
| | GPCQRVVSTHNLWLLSFLRRWNGSTAITDDTLGGTLTITLRNLQP | lular domain (ECD) |
| | HDAGLYQCQSLHGSEADTLRKVLVEVLADPLDHRDAGDLWFPG | amino acid sequence |
| | ESESFEDAHVEHSISRSLLEGEIPFPPTS | (without signal |
| | | peptide and His tag) |
| 2374 | DLWFPGESES | Human TREM2 peptide |
| 2375 | DLWFPGESE | Human TREM2 peptide |
| | | 9-mer amino acid |
| | | sequence |
| 2376 | DLWFP | Human TREM2 peptide |
| | | sequence (residues |
| | | 140-144 of full- |
| | | length TREM2) |
| 2377 | APELLGGPSVFLFPPKPKDTLMISRTPEVTCVVVDVSHEDPEVKFNWYVDG | Clone CH3C.18.3.4-1 |
| | VEVHNAKTKPREEQYNSTYRVVSVLTVLHQDWLNGKEYKCKVSNKALP | (CH3C.3.4-1) |
| | APIEKTISKAKGQPREPQVYTLPPSRDELTKNQVSLTCLVKGFYPSDIAVEW | |
| | ESWGFVWSTYKTTPPVLDSDGSFFLYSKLTVPKSNWQQGFVFSCSVMHEA | |
| | LHNHYTQKSLSLSPGK | |
| 2378 | APELLGGPSVFLFPPKPKDTLMISRTPEVTCVVVDVSHEDPEVKFNWYVDG | Clone CH3C.18.3.4-19 |
| | VEVHNAKTKPREEQYNSTYRVVSVLTVLHQDWLNGKEYKCKVSNKALP | (CH3C.3.4-19) |
| | APIEKTISKAKGQPREPQVYTLPPSRDELTKNQVSLTCLVKGFYPSDIAVEW | |
| | ESWGHVWSTYKTTPPVLDSDGSFFLYSKLTVPKSNWQQGYVFSCSVMHE | |
| | ALHNHYTQKSLSLSPGK | |
| 2379 | APELLGGPSVFLFPPKPKDTLMISRTPEVTCVVVDVSHEDPEVKFNWYVDG | Clone CH3C.18.3.2-3 |
| | VEVHNAKTKPREEQYNSTYRVVSVLTVLHQDWLNGKEYKCKVSNKALP | (CH3C.3.2-3) |
| | APIEKTISKAKGQPREPQVYTLPPSRDELTKNQVSLTCLVKGFYPSDIAVEW | |
| | ESLGHVWVEQKTTPPVLDSDGSFFLYSKLTVPKSTWQQGWVFSCSVMHE | |
| | ALHNHYTQKSLSLSPGK | |
| 2380 | APELLGGPSVFLFPPKPKDTLMISRTPEVTCVVVDVSHEDPEVKFNWYVDG | Clone CH3C.18.3.2-14 |
| | VEVHNAKTKPREEQYNSTYRVVSVLTVLHQDWLNGKEYKCKVSNKALP | (CH3C.3.2-14) |
| | APIEKTISKAKGQPREPQVYTLPPSRDELTKNQVSLTCLVKGFYPSDIAVEW | |
| | ESLGHVWVGVKTTPPVLDSDGSFFLYSKLTVPKSTWQQGWVFSCSVMHE | |
| | ALHNHYTQKSLSLSPGK | |
| 2381 | APELLGGPSVFLFPPKPKDTLMISRTPEVTCVVVDVSHEDPEVKFNWYVDG | Clone CH3C.18.3.2-24 |
| | VEVHNAKTKPREEQYNSTYRVVSVLTVLHQDWLNGKEYKCKVSNKALP | (CH3C.3.2-24) |
| | APIEKTISKAKGQPREPQVYTLPPSRDELTKNQVSLTCLVKGFYPSDIAVEW | |
| | ESLGHVWVHTKTTPPVLDSDGSFFLYSKLTVPKSTWQQGWVFSCSVMHE | |
| | ALHNHYTQKSLSLSPGK | |
| 2382 | APELLGGPSVFLFPPKPKDTLMISRTPEVTCVVVDVSHEDPEVKFNWYVDG | Clone CH3C18.3.4-26 |
| | VEVHNAKTKPREEQYNSTYRVVSVLTVLHQDWLNGKEYKCKVSNKALP | (CH3C.3.4-26) |
| | APIEKTISKAKGQPREPQVYTLPPSRDELTKNQVSLTCLVKGFYPSDIAVEW | |
| | ESWGTVWGTYKTTPPVLDSDGSFFLYSKLTVPKSNVVQQGYVFSCSVMHE | |
| | ALHNHYTQKSLSLSPGK | |
| 2383 | APELLGGPSVFLFPPKPKDTLMISRTPEVTCVVVDVSHEDPEVKFNWYVDG | Clone CH3C.18.3.2-17 |
| | VEVHNAKTKPREEQYNSTYRVVSVLTVLHQDWLNGKEYKCKVSNKALP | (CH3C.3.2-17) |
| | APIEKTISKAKGQPREPQVYTLPPSRDELTKNQVSLTCLVKGFYPSDIAVEW | |
| | ESLGHVWVGTKTTPPVLDSDGSFFLYSKLTVPKSTWQQGWVFSCSVMHE | |
| | ALHNHYTQKSLSLSPGK | |
| 2384 | APELLGGPSVFLFPPKPKDTLMISRTPEVTCVVVDVSHEDPEVKFNWYVDG | Clone CH3C.35.20.1.1 |
| | VEVHNAKTKPREEQYNSTYRVVSVLTVLHQDWLNGKEYKCKVSNKALP | |
| | APIEKTISKAKGQPREPQVYTLPPSRDELTKNQVSLTCLVKGFYPSDIAVEW | |
| | ESFGTEWSSYKTTPPVLDSDGSFFLYSKLTVSKEEWQQGFVFSCSVMHEAL | |
| | HNHYTQKSLSLSPGK | |
| 2385 | APELLGGPSVFLFPPKPKDTLMISRTPEVTCVVVDVSHEDPEVKFNWYVDG | Clone CH3C.35.23.2.1 |
| | VEVHNAKTKPREEQYNSTYRVVSVLTVLHQDWLNGKEYKCKVSNKALP | |
| | APIEKTISKAKGQPREPQVYTLPPSRDELTKNQVSLTCLVKGFYPSDIAVEW | |
| | ESYGTEWANYKTTPPVLDSDGSFFLYSKLTVSKSEWQQGFVFSCSVMHEA | |
| | LHNHYTQKSLSLSPGK | |
| 2386 | APELLGGPSVFLFPPKPKDTLMISRTPEVTCVVVDVSHEDPEVKFNWYVDG | Clone CH3C.35.23.1.1 |
| | VEVHNAKTKPREEQYNSTYRVVSVLTVLHQDWLNGKEYKCKVSNKALP | |
| | APIEKTISKAKGQPREPQVYTLPPSRDELTKNQVSLTCLVKGFYPSDIAVEW | |
| | ESFGTEWSNYKTTPPVLDSDGSFFLYSKLTVSKEEWQQGFVFSCSVMHEA | |
| | LHNHYTQKSLSLSPGK | |
| 2387 | APELLGGPSVFLFPPKPKDTLMISRTPEVTCVVVDVSHEDPEVKFNWYVDG | Clone CH3C.35.S413 |
| | VEVHNAKTKPREEQYNSTYRVVSVLTVLHQDWLNGKEYKCKVSNKALP | |
| | APIEKTISKAKGQPREPQVYTLPPSRDELTKNQVSLTCLVKGFYPSDIAVEW | |
| | ESYGTEWSSYKTTPPVLDSDGSFFLYSKLTVSKSEWQQGFVFSCSVMHEA | |
| | LHNHYTQKSLSLSPGK | |
| 2388 | APELLGGPSVFLFPPKPKDTLMISRTPEVTCVVVDVSHEDPEVKFNWYVDG | Clone CH3C.35.23.3.1 |
| | VEVHNAKTKPREEQYNSTYRVVSVLTVLHQDWLNGKEYKCKVSNKALP | |
| | APIEKTISKAKGQPREPQVYTLPPSRDELTKNQVSLTCLVKGFYPSDIAVEW | |
| | ESYGTEWVNYKTTPPVLDSDGSFFLYSKLTVSKEEWQQGFVFSCSVMHEA | |
| | LHNHYTQKSLSLSPGK | |
| 2389 | APELLGGPSVFLFPPKPKDTLMISRTPEVTCVVVDVSHEDPEVKFNWYVDG | Clone CH3C.35.N390.1 |
| | VEVHNAKTKPREEQYNSTYRVVSVLTVLHQDWLNGKEYKCKVSNKALP | |
| | APIEKTISKAKGQPREPQVYTLPPSRDELTKNQVSLTCLVKGFYPSDIAVEW | |
| | ESYGTEWSNYKTTPPVLDSDGSFFLYSKLTVSKSEWQQGFVFSCSVMHEA | |
| | LHNHYTQKSLSLSPGK | |
| 2390 | APELLGGPSVFLEPPKPKDTLMISRTPEVTCVVVDVSHEDPEVKFNWYVDG | Clone CH3C.35.23.6.1 |
| | VEVHNAKTKPREEQYNSTYRVVSVLTVLHQDWLNGKEYKCKVSNKALP | |
| | APIEKTISKAKGQPREPQVYTLPPSRDELTKNQVSLTCLVKGFYPSDIAVEW | |
| | ESFGTEWVNYKTTPPVLDSDGSFFLYSKLTVSKEEWQQGFVFSCSVMHEA | |
| | LHNHYTQKSLSLSPGK | |
| 2391 | APEAAGGPSVFLEPPKPKDTLMISRTPEVTCVVVDVSHEDPEVKFNWYVD | Clone CH3C.35.21 with |
| | GVEVHNAKTKPREEQYNSTYRVVSVLTVLHQDWLNGKEYKCKVSNKAL | knob and LALAPG |
| | GAPIEKTISKAKGQPREPQVYTLPPSRDELTKNQVSLWCLVKGFYPSDIAV | mutations |
| | WWESYGTEWSSYKTTPPVLDSDGSFFLYSKLTVTKEEWQQGFVFSCSVM | |
| | HEALHNHYTQKSLSLSPGK | |
| 2392 | APEAAGGPSVFLEPPKPKDTLYITREPEVTCVVVDVSHEDPEVKFNWYVD | Clone CH3C.35.21 with |
| | GVEVHNAKTKPREEQYNSTYRVVSVLTVLHQDWLNGKEYKCKVSNKAL | knob, LALAPG, and |
| | GAPIEKTISKAKGQPREPQVYTLPPSRDELTKNQVSLWCLVKGFYPSDIAV | YTE mutations |
| | WWESYGTEWSSYKTTPPVLDSDGSFFLYSKLTVTKEEWQQGFVFSCSVM | |
| | HEALHNHYTQKSLSLSPGK | |
| 2393 | APEAAGGPSVFLEPPKPKDTLMISRTPEVTCVVVDVSHEDPEVKFNWYVD | Clone CH3C.35.21 with |
| | GVEVHNAKTKPREEQYNSTYRVVSVLTVLHQDWLNGKEYKCKVSNKAL | hole and LALAPG |
| | GAPIEKTISKAKGQPREPQVYTLPPSRDELTKNQVSLSCAVKGFYPSDIAV | mutations |
| | WWESYGTEWSSYKTTPPVLDSDGSFFLVSKLTVTKEEWQQGFVFSCSVM | |
| | HEALHNHYTQKSLSLSPGK | |
| 2394 | APEAAGGPSVFLEPPKPKDTLYITREPEVTCVVVDVSHEDPEVKFNWYVD | Clone CH3C.35.21 with |
| | GVEVHNAKTKPREEQYNSTYRVVSVLTVLHQDWLNGKEYKCKVSNKAL | hole, LALAPG, and |
| | GAPIEKTISKAKGQPREPQVYTLPPSRDELTKNQVSLSCAVKGFYPSDIAV | YTE mutations |
| | WWESYGTEWSSYKTTPPVLDSDGSFFLVSKLTVTKEEWQQGFVFSCSVM | |
| | HEALHNHYTQKSLSLSPGK | |
| 2395 | APELLGGPSVFLEPPKPKDTLMISRTPEVTCVVVDVSHEDPEVKFNWYVDG | Clone CH3C.35.20.1.1 |
| | VEVHNAKTKPREEQYNSTYRVVSVLTVLHQDWLNGKEYKCKVSNKALP | with knob mutation |
| | APIEKTISKAKGQPREPQVYTLPPSRDELTKNQVSLWCLVKGFYPSDIAVE | |
| | WESFGTEWSSYKTTPPVLDSDGSFFLYSKLTVSKEEWQQGFVFSCSVMHE | |
| | ALHNHYTQKSLSLSPGK | |
| 2396 | APEAAGGPSVFLEPPKPKDTLMISRTPEVTCVVVDVSHEDPEVKFNWYVD | Clone CH3C.35.20.1.1 |
| | GVEVHNAKTKPREEQYNSTYRVVSVLTVLHQDWLNGKEYKCKVSNKAL | with knob and LALA |
| | PAPIEKTISKAKGQPREPQVYTLPPSRDELTKNQVSLWCLVKGFYPSDIAVE | mutations |
| | WESFGTEWSSYKTTPPVLDSDGSFFLYSKLTVSKEEWQQGFVFSCSVMHE | |
| | ALHNHYTQKSLSLSPGK | |
| 2397 | APEAAGGPSVFLEPPKPKDTLMISRTPEVTCVVVDVSHEDPEVKFNWYVD | Clone CH3C.35.20.1.1 |
| | GVEVHNAKTKPREEQYNSTYRVVSVLTVLHQDWLNGKEYKCKVSNKAL | with knob and LALAPG |
| | GAPIEKTISKAKGQPREPQVYTLPPSRDELTKNQVSLWCLVKGFYPSDIAV | mutations |
| | EWESFGTEWSSYKTTPPVLDSDGSFFLYSKLTVSKEEWQQGFVFSCSVMH | |
| | EALHNHYTQKSLSLSPGK | |
| 2398 | APELLGGPSVFLEPPKPKDTLYITREPEVTCVVVDVSHEDPEVKFNWYVDG | Clone CH3C.35.20.1.1 |
| | VEVHNAKTKPREEQYNSTYRVVSVLTVLHQDWLNGKEYKCKVSNKALP | with knob and YTE |
| | APIEKTISKAKGQPREPQVYTLPPSRDELTKNQVSLWCLVKGFYPSDIAVE | mutations |
| | WESFGTEWSSYKTTPPVLDSDGSFFLYSKLTVSKEEWQQGFVFSCSVMHE | |
| | ALHNHYTQKSLSLSPGK | |
| 2399 | APEAAGGPSVFLEPPKPKDTLYITREPEVTCVVVDVSHEDPEVKFNWYVD | Clone CH3C.35.20.1.1 |
| | GVEVHNAKTKPREEQYNSTYRVVSVLTVLHQDWLNGKEYKCKVSNKAL | with knob, LALA, and |
| | PAPIEKTISKAKGQPREPQVYTLPPSRDELTKNQVSLWCLVKGFYPSDIAVE | YTE mutations |
| | WESFGTEWSSYKTTPPVLDSDGSFFLYSKLTVSKEEWQQGFVFSCSVMHE | |
| | ALHNHYTQKSLSLSPGK | |
| 2400 | APEAAGGPSVFLFPPKPKDTLYITREPEVTCVVVDVSHEDPEVKFNWYVD | Clone CH3C.35.20.1.1 |
| | GVEVHNAKTKPREEQYNSTYRVVSVLTVLHQDWLNGKEYKCKVSNKAL | with knob, LALAPG, and |
| | GAPIEKTISKAKGQPREPQVYTLPPSRDELTKNQVSLWCLVKGFYPSDIAV | YTE mutations |
| | EWESFGTEWSSYKTTPPVLDSDGSFFLYSKLTVSKEEWQQGFVFSCSVMH | |
| | EALHNHYTQKSLSLSPGK | |
| 2401 | APELLGGPSVFLFPPKPKDTLMISRTPEVTCVVVDVSHEDPEVKFNWYVDG | Clone CH3C.35.20.1.1 |
| | VEVHNAKTKPREEQYNSTYRVVSVLTVLHQDWLNGKEYKCKVSNKALP | with hole mutations |
| | APIEKTISKAKGQPREPQVYTLPPSRDELTKNQVSLSCAVKGFYPSDIAVEW | |
| | ESFGTEWSSYKTTPPVLDSDGSFFLVSKLTVSKEEWQQGFVFSCSVMHEAL | |
| | HNHYTQKSLSLSPGK | |
| 2402 | APEAAGGPSVFLFPPKPKDTLMISRTPEVTCVVVDVSHEDPEVKFNWYVD | Clone CH3C.35.20.1.1 |
| | GVEVHNAKTKPREEQYNSTYRVVSVLTVLHQDWLNGKEYKCKVSNKAL | with hole and LALA |
| | PAPIEKTISKAKGQPREPQVYTLPPSRDELTKNQVSLSCAVKGFYPSDIAVE | mutations |
| | WESFGTEWSSYKTTPPVLDSDGSFFLVSKLTVSKEEWQQGFVFSCSVMHE | |
| | ALHNHYTQKSLSLSPGK | |
| 2403 | APEAAGGPSVFLFPPKPKDTLMISRTPEVTCVVVDVSHEDPEVKFNWYVD | Clone CH3C.35.20.1.1 |
| | GVEVHNAKTKPREEQYNSTYRVVSVLTVLHQDWLNGKEYKCKVSNKAL | with hole and LALAPG |
| | GAPIEKTISKAKGQPREPQVYTLPPSRDELTKNQVSLSCAVKGFYPSDIAVE | mutations |
| | WESFGTEWSSYKTTPPVLDSDGSFFLVSKLTVSKEEWQQGFVFSCSVMHE | |
| | ALHNHYTQKSLSLSPGK | |
| 2404 | APELLGGPSVFLFPPKPKDTLYITREPEVTCVVVDVSHEDPEVKFNWYVDG | Clone CH3C.35.20.1.1 |
| | VEVHNAKTKPREEQYNSTYRVVSVLTVLHQDWLNGKEYKCKVSNKALP | with hole and YTE |
| | APIEKTISKAKGQPREPQVYTLPPSRDELTKNQVSLSCAVKGFYPSDIAVEW | mutations |
| | ESFGTEWSSYKTTPPVLDSDGSFFLVSKLTVSKEEWQQGFVFSCSVMHEAL | |
| | HNHYTQKSLSLSPGK | |
| 2405 | APEAAGGPSVFLFPPKPKDTLYITREPEVTCVVVDVSHEDPEVKFNWYVD | Clone CH3C.35.20.1.1 |
| | GVEVHNAKTKPREEQYNSTYRVVSVLTVLHQDWLNGKEYKCKVSNKAL | with hole, LALA, and |
| | PAPIEKTISKAKGQPREPQVYTLPPSRDELTKNQVSLSCAVKGFYPSDIAVE | YTE mutations |
| | WESFGTEWSSYKTTPPVLDSDGSFFLVSKLTVSKEEWQQGFVFSCSVMHE | |
| | ALHNHYTQKSLSLSPGK | |
| 2406 | APEAAGGPSVFLFPPKPKDTLYITREPEVTCVVVDVSHEDPEVKFNWYVD | Clone CH3C.35.20.1.1 |
| | GVEVHNAKTKPREEQYNSTYRVVSVLTVLHQDWLNGKEYKCKVSNKAL | with hole, LALAPG, and |
| | GAPIEKTISKAKGQPREPQVYTLPPSRDELTKNQVSLSCAVKGFYPSDIAVE | YTE mutations |
| | WESFGTEWSSYKTTPPVLDSDGSFFLVSKLTVSKEEWQQGFVFSCSVMHE | |
| | ALHNHYTQKSLSLSPGK | |
| 2407 | APELLGGPSVFLFPPKPKDTLMISRTPEVTCVVVDVSHEDPEVKFNWYVDG | Clone CH3C.35.23.2.1 |
| | VEVHNAKTKPREEQYNSTYRVVSVLTVLHQDWLNGKEYKCKVSNKALP | with knob mutation |
| | APIEKTISKAKGQPREPQVYTLPPSRDELTKNQVSLWCLVKGFYPSDIAVE | |
| | WESYGTEWANYKTTPPVLDSDGSFFLYSKLTVSKSEWQQGFVFSCSVMHE | |
| | ALHNHYTQKSLSLSPGK | |
| 2408 | APEAAGGPSVFLFPPKPKDTLMISRTPEVTCVVVDVSHEDPEVKFNWYVD | Clone CH3C.35.23.2.1 |
| | GVEVHNAKTKPREEQYNSTYRVVSVLTVLHQDWLNGKEYKCKVSNKAL | with knob and LALA |
| | PAPIEKTISKAKGQPREPQVYTLPPSRDELTKNQVSLWCLVKGFYPSDIAVE | mutations |
| | WESYGTEWANYKTTPPVLDSDGSFFLYSKLTVSKSEWQQGFVFSCSVMHE | |
| | ALHNHYTQKSLSLSPGK | |
| 2409 | APEAAGGPSVFLFPPKPKDTLMISRTPEVTCVVVDVSHEDPEVKFNWYVD | Clone CH3C.35.23.2.1 |
| | GVEVHNAKTKPREEQYNSTYRVVSVLTVLHQDWLNGKEYKCKVSNKAL | with knob and LALAPG |
| | GAPIEKTISKAKGQPREPQVYTLPPSRDELTKNQVSLWCLVKGFYPSDIAV | mutations |
| | EWESYGTEWANYKTTPPVLDSDGSFFLYSKLTVSKSEWQQGFVFSCSVMH | |
| | EALHNHYTQKSLSLSPGK | |
| 2410 | APELLGGPSVFLFPPKPKDTLYITREPEVTCVVVDVSHEDPEVKFNWYVDG | Clone CH3C.35.23.2.1 |
| | VEVHNAKTKPREEQYNSTYRVVSVLTVLHQDWLNGKEYKCKVSNKALP | with knob and YTE |
| | APIEKTISKAKGQPREPQVYTLPPSRDELTKNQVSLWCLVKGFYPSDIAVE | mutations |
| | WESYGTEWANYKTTPPVLDSDGSFFLYSKLTVSKSEWQQGFVFSCSVMHE | |
| | ALHNHYTQKSLSLSPGK | |
| 2411 | APEAAGGPSVFLFPPKPKDTLYITREPEVTCVVVDVSHEDPEVKFNWYVD | Clone CH3C.35.23.2.1 |
| | GVEVHNAKTKPREEQYNSTYRVVSVLTVLHQDWLNGKEYKCKVSNKAL | with knob, LALA, and |
| | PAPIEKTISKAKGQPREPQVYTLPPSRDELTKNQVSLWCLVKGFYPSDIAVE | YTE mutations |
| | WESYGTEWANYKTTPPVLDSDGSFFLYSKLTVSKSEWQQGFVFSCSVMHE | |
| | ALHNHYTQKSLSLSPGK | |
| 2412 | APEAAGGPSVFLFPPKPKDTLYITREPEVTCVVVDVSHEDPEVKFNWYVD | Clone CH3C.35.23.2.1 |
| | GVEVHNAKTKPREEQYNSTYRVVSVLTVLHQDWLNGKEYKCKVSNKAL | with knob, LALAPG, and |
| | GAPIEKTISKAKGQPREPQVYTLPPSRDELTKNQVSLWCLVKGFYPSDIAV | YTE mutations |
| | EWESYGTEWANYKTTPPVLDSDGSFFLYSKLTVSKSEWQQGFVFSCSVMH | |
| | EALHNHYTQKSLSLSPGK | |
| 2413 | APELLGGPSVFLFPPKPKDTLMISRTPEVTCVVVDVSHEDPEVKFNWYVDG | Clone CH3C.35.23.2.1 |
| | VEVHNAKTKPREEQYNSTYRVVSVLTVLHQDWLNGKEYKCKVSNKALP | with hole mutations |
| | APIEKTISKAKGQPREPQVYTLPPSRDELTKNQVSLSCAVKGFYPSDIAVEW | |
| | ESYGTEWANYKTTPPVLDSDGSFFLVSKLTVSKSEWQQGFVFSCSVMHEA | |
| | LHNHYTQKSLSLSPGK | |
| 2414 | APEAAGGPSVFLFPPKPKDTLMISRTPEVTCVVVDVSHEDPEVKFNWYVD | Clone CH3C.35.23.2.1 |
| | GVEVHNAKTKPREEQYNSTYRVVSVLTVLHQDWLNGKEYKCKVSNKAL | with hole and LALA |
| | PAPIEKTISKAKGQPREPQVYTLPPSRDELTKNQVSLSCAVKGFYPSDIAVE | mutations |
| | WESYGTEWANYKTTPPVLDSDGSFFLVSKLTVSKSEWQQGFVFSCSVMHE | |
| | ALHNHYTQKSLSLSPGK | |
| 2415 | APEAAGGPSVFLFPPKPKDTLMISRTPEVTCVVVDVSHEDPEVKFNWYVD | Clone CH3C.35.23.2.1 |
| | GVEVHNAKTKPREEQYNSTYRVVSVLTVLHQDWLNGKEYKCKVSNKAL | with hole and LALAPG |
| | GAPIEKTISKAKGQPREPQVYTLPPSRDELTKNQVSLSCAVKGFYPSDIAVE | mutations |
| | WESYGTEWANYKTTPPVLDSDGSFFLVSKLTVSKSEWQQGFVFSCSVMHE | |
| | ALHNHYTQKSLSLSPGK | |
| 2416 | APELLGGPSVFLFPPKPKDTLYITREPEVTCVVVDVSHEDPEVKFNWYVDG | Clone CH3C.35.23.2.1 |
| | VEVHNAKTKPREEQYNSTYRVVSVLTVLHQDWLNGKEYKCKVSNKALP | with hole and YTE |
| | APIEKTISKAKGQPREPQVYTLPPSRDELTKNQVSLSCAVKGFYPSDIAVEW | mutations |
| | ESYGTEWANYKTTPPVLDSDGSFFLVSKLTVSKSEWQQGFVFSCSVMHEA | |
| | LHNHYTQKSLSLSPGK | |
| 2417 | APEAAGGPSVFLFPPKPKDTLYITREPEVTCVVVDVSHEDPEVKFNWYVD | Clone CH3C.35.23.2.1 |
| | GVEVHNAKTKPREEQYNSTYRVVSVLTVLHQDWLNGKEYKCKVSNKAL | with hole, LALA, and |
| | PAPIEKTISKAKGQPREPQVYTLPPSRDELTKNQVSLSCAVKGFYPSDIAVE | YTE mutations |
| | WESYGTEWANYKTTPPVLDSDGSFFLVSKLTVSKSEWQQGFVFSCSVMHE | |
| | ALHNHYTQKSLSLSPGK | |
| 2418 | APEAAGGPSVFLFPPKPKDTLYITREPEVTCVVVDVSHEDPEVKFNWYVD | Clone CH3C.35.23.2.1 |
| | GVEVHNAKTKPREEQYNSTYRVVSVLTVLHQDWLNGKEYKCKVSNKAL | with hole LALAPG, and |
| | GAPIEKTISKAKGQPREPQVYTLPPSRDELTKNQVSLSCAVKGFYPSDIAVE | YTE mutations |
| | WESYGTEWANYKTTPPVLDSDGSFFLVSKLTVSKSEWQQGFVFSCSVMHE | |
| | ALHNHYTQKSLSLSPGK | |
| 2419 | APELLGGPSVFLFPPKPKDTLMISRTPEVTCVVVDVSHEDPEVKFNWYVDG | |
| | VEVHNAKTKPREEQYNSTYRVVSVLTVLHQDWLNGKEYKCKVSNKALP | Clone CH3C.35.23.1.1 |
| | APIEKTISKAKGQPREPQVYTLPPSRDELTKNQVSLWCLVKGFYPSDIAVE | with knob mutation |
| | WESFGTEWSNYKTTPPVLDSDGSFFLYSKLTVSKEEWQQGFVFSCSVMHE | |
| | ALHNHYTQKSLSLSPGK | |
| 2420 | APEAAGGPSVFLFPPKPKDTLMISRTPEVTCVVVDVSHEDPEVKFNWYVD | Clone CH3C.35.23.1.1 |
| | GVEVHNAKTKPREEQYNSTYRVVSVLTVLHQDWLNGKEYKCKVSNKAL | with knob and LALA |
| | PAPIEKTISKAKGQPREPQVYTLPPSRDELTKNQVSLWCLVKGFYPSDIAVE | mutations |
| | WESFGTEWSNYKTTPPVLDSDGSFFLYSKLTVSKEEWQQGFVFSCSVMHE | |
| | ALHNHYTQKSLSLSPGK | |
| 2421 | APEAAGGPSVFLFPPKPKDTLMISRTPEVTCVVVDVSHEDPEVKFNWYVD | Clone CH3C.35.23.1.1 |
| | GVEVHNAKTKPREEQYNSTYRVVSVLTVLHQDWLNGKEYKCKVSNKAL | with knob and |
| | GAPIEKTISKAKGQPREPQVYTLPPSRDELTKNQVSLWCLVKGFYPSDIAV | LALAPG mutations |
| | EWESFGTEWSNYKTTPPVLDSDGSFFLYSKLTVSKEEWQQGFVFSCSVMH | |
| | EALHNHYTQKSLSLSPGK | |
| 2422 | APELLGGPSVFLFPPKPKDTLYITREPEVTCVVVDVSHEDPEVKFNWYVDG | Clone CH3C.35.23.1.1 |
| | VEVHNAKTKPREEQYNSTYRVVSVLTVLHQDWLNGKEYKCKVSNKALP | with knob and YTE |
| | APIEKTISKAKGQPREPQVYTLPPSRDELTKNQVSLWCLVKGFYPSDIAVE | mutations |
| | WESFGTEWSNYKTTPPVLDSDGSFFLYSKLTVSKEEWQQGFVFSCSVMHE | |
| | ALHNHYTQKSLSLSPGK | |
| 2423 | APEAAGGPSVFLFPPKPKDTLYITREPEVTCVVVDVSHEDPEVKFNWYVD | Clone CH3C.35.23.1.1 |
| | GVEVHNAKTKPREEQYNSTYRVVSVLTVLHQDWLNGKEYKCKVSNKAL | with knob, LALA, and |
| | PAPIEKTISKAKGQPREPQVYTLPPSRDELTKNQVSLWCLVKGFYPSDIAVE | YTE mutations |
| | WESFGTEWSNYKTTPPVLDSDGSFFLYSKLTVSKEEWQQGFVFSCSVMHE | |
| | ALHNHYTQKSLSLSPGK | |
| 2424 | APEAAGGPSVFLFPPKPKDTLYITREPEVTCVVVDVSHEDPEVKFNWYVD | Clone CH3C.35.23.1.1 |
| | GVEVHNAKTKPREEQYNSTYRVVSVLTVLHQDWLNGKEYKCKVSNKAL | with knob, LALAPG, |
| | GAPIEKTISKAKGQPREPQVYTLPPSRDELTKNQVSLWCLVKGFYPSDIAV | and YTE mutations |
| | EWESFGTEWSNYKTTPPVLDSDGSFFLYSKLTVSKEEWQQGFVFSCSVMH | |
| | EALHNHYTQKSLSLSPGK | |
| 2425 | APELLGGPSVFLFPPKPKDTLMISRTPEVTCVVVDVSHEDPEVKFNWYVDG | Clone CH3C.35.23.1.1 |
| | VEVHNAKTKPREEQYNSTYRVVSVLTVLHQDWLNGKEYKCKVSNKALP | with hole mutations |
| | APIEKTISKAKGQPREPQVYTLPPSRDELTKNQVSLSCAVKGFYPSDIAVEW | |
| | ESFGTEWSNYKTTPPVLDSDGSFFLVSKLTVSKEEWQQGFVFSCSVMHEA | |
| | LHNHYTQKSLSLSPGK | |
| 2426 | APEAAGGPSVFLFPPKPKDTLMISRTPEVTCVVVDVSHEDPEVKFNWYVD | Clone CH3C.35.23.1.1 |
| | GVEVHNAKTKPREEQYNSTYRVVSVLTVLHQDWLNGKEYKCKVSNKAL | with hole and LALA |
| | PAPIEKTISKAKGQPREPQVYTLPPSRDELTKNQVSLSCAVKGFYPSDIAVE | mutations |
| | WESFGTEWSNYKTTPPVLDSDGSFFLVSKLTVSKEEWQQGFVFSCSVMHE | |
| | ALHNHYTQKSLSLSPGK | |
| 2427 | APEAAGGPSVFLFPPKPKDTLMISRTPEVTCVVVDVSHEDPEVKFNWYVD | Clone CH3C.35.23.1.1 |
| | GVEVHNAKTKPREEQYNSTYRVVSVLTVLHQDWLNGKEYKCKVSNKAL | with hole and |
| | GAPIEKTISKAKGQPREPQVYTLPPSRDELTKNQVSLSCAVKGFYPSDIAVE | LALAPG mutations |
| | WESFGTEWSNYKTTPPVLDSDGSFFLVSKLTVSKEEWQQGFVFSCSVMHE | |
| | ALHNHYTQKSLSLSPGK | |
| 2428 | APELLGGPSVFLFPPKPKDTLYITREPEVTCVVVDVSHEDPEVKFNWYVDG | Clone CH3C.35.23.1.1 |
| | VEVHNAKTKPREEQYNSTYRVVSVLTVLHQDWLNGKEYKCKVSNKALP | with hole and YTE |
| | APIEKTISKAKGQPREPQVYTLPPSRDELTKNQVSLSCAVKGFYPSDIAVEW | mutations |
| | ESFGTEWSNYKTTPPVLDSDGSFFLVSKLTVSKEEWQQGFVFSCSVMHEA | |
| | LHNHYTQKSLSLSPGK | |
| 2429 | APEAAGGPSVFLFPPKPKDTLYITREPEVTCVVVDVSHEDPEVKFNWYVD | Clone CH3C.35.23.1.1 |
| | GVEVHNAKTKPREEQYNSTYRVVSVLTVLHQDWLNGKEYKCKVSNKAL | with hole, LALA, and |
| | PAPIEKTISKAKGQPREPQVYTLPPSRDELTKNQVSLSCAVKGFYPSDIAVE | YTE mutations |
| | WESFGTEWSNYKTTPPVLDSDGSFFLVSKLTVSKEEWQQGFVFSCSVMHE | |
| | ALHNHYTQKSLSLSPGK | |
| 2430 | APEAAGGPSVFLEPPKPKDTLYITREPEVTCVVVDVSHEDPEVKFNWYVD | Clone CH3C.35.23. 1.1 |
| | GVEVHNAKTKPREEQYNSTYRVVSVLTVLHQDWLNGKEYKCKVSNKAL | with hole, LALAPG, |
| | GAPIEKTISKAKGQPREPQVYTLPPSRDELTKNQVSLSCAVKGFYPSDIAVE | and YTE mutations |
| | WESFGTEWSNYKTTPPVLDSDGSFFLVSKLTVSKEEWQQGFVFSCSVMHE | |
| | ALHNHYTQKSLSLSPGK | |
| 2431 | APELLGGPSVFLEPPKPKDTLMISRTPEVTCVVVDVSHEDPEVKFNWYVDG | Clone CH3C.35.20.1 |
| | VEVHNAKTKPREEQYNSTYRVVSVLTVLHQDWLNGKEYKCKVSNKALP | M428L and N434S |
| | APIEKTISKAKGQPREPQVYTLPPSRDELTKNQVSLTCLVKGFYPSDIAVEW | mutations |
| | ESEGTEWSSYKTTPPVLDSDGSFFLYSKLTVTKEEWQQGFVFSCSVLHEAL | |
| | HSHYTQKSLSLSPGK | |
| 2432 | APELLGGPSVFLEPPKPKDTLMISRTPEVTCVVVDVSHEDPEVKFNWYVDG | Clone CH3C.35.20.1 |
| | VEVHNAKTKPREEQYNSTYRVVSVLTVLHQDWLNGKEYKCKVSNKALP | with knob and M428L |
| | APIEKTISKAKGQPREPQVYTLPPSRDELTKNQVSLWCLVKGFYPSDIAVE | and N434S mutations |
| | WESFGTEWSSYKTTPPVLDSDGSFFLYSKLTVTKEEWQQGFVFSCSVLHE | |
| | ALHSHYTQKSLSLSPGK | |
| 2433 | APEAAGGPSVFLEPPKPKDTLMISRTPEVTCVVVDVSHEDPEVKFNWYVD | Clone CH3C.35.20.1 |
| | GVEVHNAKTKPREEQYNSTYRVVSVLTVLHQDWLNGKEYKCKVSNKAL | with knob, LALA, |
| | PAPIEKTISKAKGQPREPQVYTLPPSRDELTKNQVSLWCLVKGFVPSDIAVE | and M428L and N434S |
| | WESFGTEWSSYKTTPPVLDSDGSFFLYSKLTVTKEEWQQGFVFSCSVLHE | mutations |
| | ALHSHYTQKSLSLSPGK | |
| 2434 | APEAAGGPSVFLEPPKPKDTLMISRTPEVTCVVVDVSHEDPEVKFNWYVD | Clone CH3C.35.20.1 |
| | GVEVHNAKTKPREEQYNSTYRVVSVLTVLHQDWLNGKEYKCKVSNKAL | with knob, LALAPG, |
| | GAPIEKTISKAKGQPREPQVYTLPPSRDELTKNQVSLWCLVKGFYPSDIAV | and M428L and N434S |
| | EWESFGTEWSSYKTTPPVLDSDGSFFLYSKLTVTKEEWQQGFVFSCSVLHE | mutations |
| | ALHSHYTQKSLSLSPGK | |
| 2435 | APELLGGPSVFLEPPKPKDTLMISRTPEVTCVVVDVSHEDPEVKFNWYVDG | Clone CH3C.35.20.1 |
| | VEVHNAKTKPREEQYNSTYRVVSVLTVLHQDWLNGKEYKCKVSNKALP | with hole and M428L |
| | APIEKTISKAKGQPREPQVYTLPPSRDELTKNQVSLSCAVKGFVPSDIAVEW | and N434S mutations |
| | ESEGTEWSSYKTTPPVLDSDGSFFLVSKLTVTKEEWQQGFVFSCSVLHEAL | |
| | HSHYTQKSLSLSPGK | |
| 2436 | APEAAGGPSVFLEPPKPKDTLMISRTPEVTCVVVDVSHEDPEVKFNWYVD | Clone CH3C.35.20.1 |
| | GVEVHNAKTKPREEQYNSTYRVVSVLTVLHQDWLNGKEYKCKVSNKAL | with hole, LALA, and |
| | PAPIEKTISKAKGQPREPQVYTLPPSRDELTKNQVSLSCAVKGFYPSDIAVE | M428L and N434S |
| | WESFGTEWSSYKTTPPVLDSDGSFFLVSKLTVTKEEWQQGFVFSCSVLHE | mutations |
| | ALHSHYTQKSLSLSPGK | |
| 2437 | APEAAGGPSVFLEPPKPKDTLMISRTPEVTCVVVDVSHEDPEVKFNWYVD | Clone CH3C.35.20.1 |
| | GVEVHNAKTKPREEQYNSTYRVVSVLTVLHQDWLNGKEYKCKVSNKAL | with hole, LALAPG, |
| | GAPIEKTISKAKGQPREPQVYTLPPSRDELTKNQVSLSCAVKGFYPSDIAVE | and M428L and N434S |
| | WESFGTEWSSYKTTPPVLDSDGSFFLVSKLTVTKEEWQQGFVFSCSVLHE | mutations |
| | ALHSHYTQKSLSLSPGK | |
| 2438 | APELLGGPSVFLEPPKPKDTLMISRTPEVTCVVVDVSHEDPEVKFNWYVDG | Clone CH3C.35.20.1.1 |
| | VEVHNAKTKPREEQYNSTYRVVSVLTVLHQDWLNGKEYKCKVSNKALP | with M428L and N434S |
| | APIEKTISKAKGQPREPQVYTLPPSRDELTKNQVSLTCLVKGFYPSDIAVEW | mutations |
| | ESEGTEWSSYKTTPPVLDSDGSFFLYSKLTVSKEEWQQGFVFSCSVLHEAL | |
| | HSHYTQKSLSLSPGK | |
| 2439 | APELLGGPSVFLEPPKPKDTLMISRTPEVTCVVVDVSHEDPEVKFNWYVDG | Clone CH3C.35.20.1.1 |
| | VEVHNAKTKPREEQYNSTYRVVSVLTVLHQDWLNGKEYKCKVSNKALP | with knob and M428L |
| | APIEKTISKAKGQPREPQVYTLPPSRDELTKNQVSLWCLVKGFYPSDIAVE | and N434S mutations |
| | WESFGTEWSSYKTTPPVLDSDGSFFLYSKLTVSKEEWQQGFVFSCSVLHEA | |
| | LHSHYTQKSLSLSPGK | |
| 2440 | APEAAGGPSVFLEPPKPKDTLMISRTPEVTCVVVDVSHEDPEVKFNWYVD | Clone CH3C.35.20.1.1 |
| | GVEVHNAKTKPREEQYNSTYRVVSVLTVLHQDWLNGKEYKCKVSNKAL | with knob, LALA, and |
| | PAPIEKTISKAKGQPREPQVYTLPPSRDELTKNQVSLWCLVKGFYPSDIAVE | M428L and N434S |
| | WESFGTEWSSYKTTPPVLDSDGSFFLYSKLTVSKEEWQQGFVFSCSVLHEA | mutations |
| | LHSHYTQKSLSLSPGK | |
| 2441 | APEAAGGPSVFLEPPKPKDTLMISRTPEVTCVVVDVSHEDPEVKFNWYVD | Clone CH3C.35.20.1.1 |
| | GVEVHNAKTKPREEQYNSTYRVVSVLTVLHQDWLNGKEYKCKVSNKAL | with knob, LALAPG, |
| | GAPIEKTISKAKGQPREPQVYTLPPSRDELTKNQVSLWCLVKGFYPSDIAV | and M428L and N434S |
| | EWESFGTEWSSYKTTPPVLDSDGSFFLYSKLTVSKEEWQQGFVFSCSVLHE | mutations |
| | ALHSHYTQKSLSLSPGK | |
| 2442 | APELLGGPSVFLEPPKPKDTLMISRTPEVTCVVVDVSHEDPEVKFNWYVDG | Clone CH3C.35.20.1.1 |
| | VEVHNAKTKPREEQYNSTYRVVSVLTVLHQDWLNGKEYKCKVSNKALP | with hole and M428L |
| | APIEKTISKAKGQPREPQVYTLPPSRDELTKNQVSLSCAVKGFYPSDIAVEW | and N434S mutations |
| | ESEGTEWSSYKTTPPVLDSDGSFFLVSKLTVSKEEWQQGFVFSCSVLHEAL | |
| | HSHYTQKSLSLSPGK | |
| 2443 | APEAAGGPSVFLEPPKPKDTLMISRTPEVTCVVVDVSHEDPEVKFNWYVD | Clone CH3C.35.20.1.1 |
| | GVEVHNAKTKPREEQYNSTYRVVSVLTVLHQDWLNGKEYKCKVSNKAL | with hole, LALA, and |
| | PAPIEKTISKAKGQPREPQVYTLPPSRDELTKNQVSLSCAVKGFYPSDIAVE | M428L and N434S |
| | WESFGTEWSSYKTTPPVLDSDGSFFLVSKLTVSKEEWQQGFVFSCSVLHEA | mutations |
| | LHSHYTQKSLSLSPGK | |
| 2444 | APEAAGGPSVFLEPPKPKDTLMISRTPEVTCVVVDVSHEDPEVKFNWYVD | Clone CH3C.35.20.1.1 |
| | GVEVHNAKTKPREEQYNSTYRVVSVLTVLHQDWLNGKEYKCKVSNKAL | with hole, LALAPG, |
| | GAPIEKTISKAKGQPREPQVYTLPPSRDELTKNQVSLSCAVKGFYPSDIAVE | and M428L and N434S |
| | WESFGTEWSSYKTTPPVLDSDGSFFLVSKLTVSKEEWQQGFVFSCSVLHEA | mutations |
| | LHSHYTQKSLSLSPGK | |
| 2445 | APELLGGPSVFLEPPKPKDTLMISRTPEVTCVVVDVSHEDPEVKFNWYVDG | Clone CH3C.35.21 with |
| | VEVHNAKTKPREEQYNSTYRVVSVLTVLHQDWLNGKEYKCKVSNKALP | M428L and N434S |
| | APIEKTISKAKGQPREPQVYTLPPSRDELTKNQVSLTCLVKGFYPSDIAVW | mutations |
| | WESYGTEWSSYKTTPPVLDSDGSFFLYSKLTVTKEEWQQGFVFSCSVLHE | |
| | ALHSHYTQKSLSLSPGK | |
| 2446 | APELLGGPSVFLEPPKPKDTLMISRTPEVTCVVVDVSHEDPEVKFNWYVDG | Clone CH3C.35.21 with |
| | VEVHNAKTKPREEQYNSTYRVVSVLTVLHQDWLNGKEYKCKVSNKALP | knob and M428L and |
| | APIEKTISKAKGQPREPQVYTLPPSRDELTKNQVSLWCLVKGFYPSDIAVW | N434S mutations |
| | WESYGTEWSSYKTTPPVLDSDGSFFLYSKLTVTKEEWQQGFVFSCSVLHE | |
| | ALHSHYTQKSLSLSPGK | |
| 2447 | APEAAGGPSVFLEPPKPKDTLMISRTPEVTCVVVDVSHEDPEVKFNWYVD | Clone CH3C.35.21 with |
| | GVEVHNAKTKPREEQYNSTYRVVSVLTVLHQDWLNGKEYKCKVSNKAL | knob, LALA, and |
| | PAPIEKTISKAKGQPREPQVYTLPPSRDELTKNQVSLWCLVKGFYPSDIAV | M428L and N434S |
| | WWESYGTEWSSYKTTPPVLDSDGSFFLYSKLTVTKEEWQQGFVFSCSVLH | mutations |
| | EALHSHYTQKSLSLSPGK | |
| 2448 | APEAAGGPSVFLEPPKPKDTLMISRTPEVTCVVVDVSHEDPEVKFNWYVD | Clone CH3C.35.21 with |
| | GVEVHNAKTKPREEQYNSTYRVVSVLTVLHQDWLNGKEYKCKVSNKAL | knob, LALAPG, and |
| | GAPIEKTISKAKGQPREPQVYTLPPSRDELTKNQVSLWCLVKGFYPSDIAV | M428L and N434S |
| | WWESYGTEWSSYKTTPPVLDSDGSFFLYSKLTVTKEEWQQGFVFSCSVLH | mutations |
| | EALHSHYTQKSLSLSPGK | |
| 2449 | APELLGGPSVFLEPPKPKDTLMISRTPEVTCVVVDVSHEDPEVKFNWYVDG | Clone CH3C.35.21 with |
| | VEVHNAKTKPREEQYNSTYRVVSVLTVLHQDWLNGKEYKCKVSNKALP | hole and M428L and |
| | APIEKTISKAKGQPREPQVYTLPPSRDELTKNQVSLSCAVKGFYPSDIAVW | N434S mutations |
| | WESYGTEWSSYKTTPPVLDSDGSFFLVSKLTVTKEEWQQGFVFSCSVLHE | |
| | ALHSHYTQKSLSLSPGK | |
| 2450 | APEAAGGPSVFLFPPKPKDTLMISRTPEVTCVVVDVSHEDPEVKFNWYVD | Clone CH3C.35.21 with |
| | GVEVHNAKTKPREEQYNSTYRVVSVLTVLHQDWLNGKEYKCKVSNKAL | hole, LALA, and |
| | PAPIEKTISKAKGQPREPQVYTLPPSRDELTKNQVSLSCAVKGFYPSDIAVW | M428L and N434S |
| | WESYGTEWSSYKTTPPVLDSDGSFFLVSKLTVTKEEWQQGFVFSCSVLHE | mutations |
| | ALHSHYTQKSLSLSPGK | |
| 2451 | APEAAGGPSVFLFPPKPKDTLMISRTPEVTCVVVDVSHEDPEVKFNWYVD | Clone CH3C.35.21 with |
| | GVEVHNAKTKPREEQYNSTYRVVSVLTVLHQDWLNGKEYKCKVSNKAL | hole, LALAPG, and |
| | GAPIEKTISKAKGQPREPQVYTLPPSRDELTKNQVSLSCAVKGFYPSDIAV | M428L and N434S |
| | WWESYGTEWSSYKTTPPVLDSDGSFFLVSKLTVTKEEWQQGFVFSCSVLH | mutations |
| | EALHSHYTQKSLSLSPGK | |
| 2452 | APELLGGPSVFLFPPKPKDTLMISRTPEVTCVVVDVSHEDPEVKFNWYVDG | Clone CH3C.35.21.17.2 |
| | VEVHNAKTKPREEQYNSTYRVVSVLTVLHQDWLNGKEYKCKVSNKALP | with M428L and N434S |
| | APIEKTISKAKGQPREPQVYTLPPSRDELTKNQVSLTCLVKGFYPSDIAVLW | mutations |
| | ESYGTEWASYKTTPPVLDSDGSFFLYSKLTVTKEEWQQGFVFSCSVLHEA | |
| | LHSHYTQKSLSLSPGK | |
| 2453 | APELLGGPSVFLFPPKPKDTLMISRTPEVTCVVVDVSHEDPEVKFNWYVDG | Clone CH3C.35.21.17.2 |
| | VEVHNAKTKPREEQYNSTYRVVSVLTVLHQDWLNGKEYKCKVSNKALP | with knob and M428L |
| | APIEKTISKAKGQPREPQVYTLPPSRDELTKNQVSLWCLVKGFYPSDIAVL | and N434S mutations |
| | WESYGTEWASYKTTPPVLDSDGSFFLYSKLTVTKEEWQQGFVFSCSVLHE | |
| | ALHSHYTQKSLSLSPGK | |
| 2454 | APEAAGGPSVFLFPPKPKDTLMISRTPEVTCVVVDVSHEDPEVKFNWYVD | Clone CH3C.35.21.17.2 |
| | GVEVHNAKTKPREEQYNSTYRVVSVLTVLHQDWLNGKEYKCKVSNKAL | with knob, LALA, and |
| | PAPIEKTISKAKGQPREPQVYTLPPSRDELTKNQVSLWCLVKGFYPSDIAVL | M428L and N434S |
| | WESYGTEWASYKTTPPVLDSDGSFFLYSKLTVTKEEWQQGFVFSCSVLHE | mutations |
| | ALHSHYTQKSLSLSPGK | |
| 2455 | APEAAGGPSVFLFPPKPKDTLMISRTPEVTCVVVDVSHEDPEVKFNWYVD | Clone CH3C.35.21.17.2 |
| | GVEVHNAKTKPREEQYNSTYRVVSVLTVLHQDWLNGKEYKCKVSNKAL | with knob, LALAPG, |
| | GAPIEKTISKAKGQPREPQVYTLPPSRDELTKNQVSLWCLVKGFYPSDIAV | and M428L and N434S |
| | LWESYGTEWASYKTTPPVLDSDGSFFLYSKLTVTKEEWQQGFVFSCSVLH | mutations |
| | EALHSHYTQKSLSLSPGK | |
| 2456 | APELLGGPSVFLFPPKPKDTLMISRTPEVTCVVVDVSHEDPEVKFNWYVDG | Clone CH3C.35.21.17.2 |
| | VEVHNAKTKPREEQYNSTYRVVSVLTVLHQDWLNGKEYKCKVSNKALP | with hole and M428L |
| | APIEKTISKAKGQPREPQVYTLPPSRDELTKNQVSLSCAVKGFYPSDIAVLW | and N434S mutations |
| | ESYGTEWASYKTTPPVLDSDGSFFLVSKLTVTKEEWQQGFVFSCSVLHEA | |
| | LHSHYTQKSLSLSPGK | |
| 2457 | APEAAGGPSVFLFPPKPKDTLMISRTPEVTCVVVDVSHEDPEVKFNWYVD | Clone CH3C.35.21.17.2 |
| | GVEVHNAKTKPREEQYNSTYRVVSVLTVLHQDWLNGKEYKCKVSNKAL | with hole LALA, and |
| | PAPIEKTISKAKGQPREPQVYTLPPSRDELTKNQVSLSCAVKGFYPSDIAVL | M428L and N434S |
| | WESYGTEWASYKTTPPVLDSDGSFFLVSKLTVTKEEWQQGFVFSCSVLHE | mutations |
| | ALHSHYTQKSLSLSPGK | |
| 2458 | APEAAGGPSVFLFPPKPKDTLMISRTPEVTCVVVDVSHEDPEVKFNWYVD | Clone CH3C.35.21.17.2 |
| | GVEVHNAKTKPREEQYNSTYRVVSVLTVLHQDWLNGKEYKCKVSNKAL | with hole, LALAPG, |
| | GAPIEKTISKAKGQPREPQVYTLPPSRDELTKNQVSLSCAVKGFYPSDIAVL | and M428L and N434S |
| | WESYGTEWASYKTTPPVLDSDGSFFLVSKLTVTKEEWQQGFVFSCSVLHE | mutations |
| | ALHSHYTQKSLSLSPGK | |
| 2459 | APELLGGPSVFLFPPKPKDTLMISRTPEVTCVVVDVSHEDPEVKFNWYVDG | Clone CH3C.35.23 with |
| | VEVHNAKTKPREEQYNSTYRVVSVLTVLHQDWLNGKEYKCKVSNKALP | M428L and N434S |
| | APIEKTISKAKGQPREPQVYTLPPSRDELTKNQVSLTCLVKGFYPSDIAVEW | mutations |
| | ESYGTEWSNYKTTPPVLDSDGSFFLYSKLTVTKEEWQQGFVFSCSVLHEA | |
| | LHSHYTQKSLSLSPGK | |
| 2460 | APELLGGPSVFLFPPKPKDTLMISRTPEVTCVVVDVSHEDPEVKFNWYVDG | Clone CH3C.35.23 with |
| | VEVHNAKTKPREEQYNSTYRVVSVLTVLHQDWLNGKEYKCKVSNKALP | knob and M428L and |
| | APIEKTISKAKGQPREPQVYTLPPSRDELTKNQVSLWCLVKGFYPSDIAVE | N434S mutations |
| | WESYGTEWSNYKTTPPVLDSDGSFFLYSKLTVTKEEWQQGFVFSCSVLHE | |
| | ALHSHYTQKSLSLSPGK | |
| 2461 | APEAAGGPSVFLFPPKPKDTLMISRTPEVTCVVVDVSHEDPEVKFNWYVD | Clone CH3C.35.23 with |
| | GVEVHNAKTKPREEQYNSTYRVVSVLTVLHQDWLNGKEYKCKVSNKAL | knob, LALA, and M428L |
| | PAPIEKTISKAKGQPREPQVYTLPPSRDELTKNQVSLWCLVKGFYPSDIAVE | and N434S mutations |
| | WESYGTEWSNYKTTPPVLDSDGSFFLYSKLTVTKEEWQQGFVFSCSVLHE | |
| | ALHSHYTQKSLSLSPGK | |
| 2462 | APEAAGGPSVFLFPPKPKDTLMISRTPEVTCVVVDVSHEDPEVKFNWYVD | Clone CH3C.35.23 with |
| | GVEVHNAKTKPREEQYNSTYRVVSVLTVLHQDWLNGKEYKCKVSNKAL | knob, LALAPG, and |
| | GAPIEKTISKAKGQPREPQVYTLPPSRDELTKNQVSLWCLVKGFYPSDIAV | M428L and N434S |
| | EWESYGTEWSNYKTTPPVLDSDGSFFLYSKLTVTKEEWQQGFVFSCSVLH | mutations |
| | EALHSHYTQKSLSLSPGK | |
| 2463 | APELLGGPSVFLFPPKPKDTLMISRTPEVTCVVVDVSHEDPEVKFNWYVDG | Clone CH3C 35.23 with |
| | VEVHNAKTKPREEQYNSTYRVVSVLTVLHQDWLNGKEYKCKVSNKALP | hole and M428L and |
| | APIEKTISKAKGQPREPQVYTLPPSRDELTKNQVSLSCAVKGFYPSDIAVEW | N434S mutations |
| | ESYGTEWSNYKTTPPVLDSDGSFFLVSKLTVTKEEWQQGFVFSCSVLHEA | |
| | LHSHYTQKSLSLSPGK | |
| 2464 | APEAAGGPSVFLFPPKPKDTLMISRTPEVTCVVVDVSHEDPEVKFNWYVD | Clone CH3C.35.23 with |
| | GVEVHNAKTKPREEQYNSTYRVVSVLTVLHQDWLNGKEYKCKVSNKAL | hole, LALA, and M428L |
| | PAPIEKTISKAKGQPREPQVYTLPPSRDELTKNQVSLSCAVKGFYPSDIAVE | and N434S mutations |
| | WESYGTEWSNYKTTPPVLDSDGSFFLVSKLTVTKEEWQQGFVFSCSVLHE | |
| | ALHSHYTQKSLSLSPGK | |
| 2465 | APEAAGGPSVFLFPPKPKDTLMISRTPEVTCVVVDVSHEDPEVKFNWYVD | Clone CH3C.35.23 with |
| | GVEVHNAKTKPREEQYNSTYRVVSVLTVLHQDWLNGKEYKCKVSNKAL | hole, LALAPG, and |
| | GAPIEKTISKAKGQPREPQVYTLPPSRDELTKNQVSLSCAVKGFYPSDIAVE | M428L and N434S |
| | WESYGTEWSNYKTTPPVLDSDGSFFLVSKLTVTKEEWQQGFVFSCSVLHE | mutations |
| | ALHSHYTQKSLSLSPGK | |
| 2466 | APELLGGPSVFLFPPKPKDTLMISRTPEVTCVVVDVSHEDPEVKFNWYVDG | Clone CH3C 35.23.1.1 |
| | VEVHNAKTKPREEQYNSTYRVVSVLTVLHQDWLNGKEYKCKVSNKALP | with M428L and N434S |
| | APIEKTISKAKGQPREPQVYTLPPSRDELTKNQVSLTCLVKGFYPSDIAVEW | mutations |
| | ESFGTEWSNYKTTPPVLDSDGSFFLYSKLTVSKEEWQQGFVFSCSVLHEAL | |
| | HSHYTQKSLSLSPGK | |
| 2467 | APELLGGPSVFLFPPKPKDTLMISRTPEVTCVVVDVSHEDPEVKFNWYVDG | Clone CH3C.35.23.1.1 |
| | VEVHNAKTKPREEQYNSTYRVVSVLTVLHQDWLNGKEYKCKVSNKALP | with knob and M428L |
| | APIEKTISKAKGQPREPQVYTLPPSRDELTKNQVSLWCLVKGFYPSDIAVE | and N434S mutations |
| | WESFGTEWSNYKTTPPVLDSDGSFFLYSKLTVSKEEWQQGFVFSCSVLHE | |
| | ALHSHYTQKSLSLSPGK | |
| 2468 | APEAAGGPSVFLFPPKPKDTLMISRTPEVTCVVVDVSHEDPEVKFNWYVD | Clone CH3C.35.23.1.1 |
| | GVEVHNAKTKPREEQYNSTYRVVSVLTVLHQDWLNGKEYKCKVSNKAL | with knob, LALA, and |
| | PAPIEKTISKAKGQPREPQVYTLPPSRDELTKNQVSLWCLVKGFYPSDIAVE | M428L and N434S |
| | WESFGTEWSNYKTTPPVLDSDGSFFLYSKLTVSKEEWQQGFVFSCSVLHE | mutations |
| | ALHSHYTQKSLSLSPGK | |
| 2469 | APEAAGGPSVFLEPPKPKDTLMISRTPEVTCVVVDVSHEDPEVKFNWYVD | Clone CH3C.35.23.1.1 |
| | GVEVHNAKTKPREEQYNSTYRVVSVLTVLHQDWLNGKEYKCKVSNKAL | with knob, LALAPG, |
| | GAPIEKTISKAKGQPREPQVYTLPPSRDELTKNQVSLWCLVKGFYPSDIAV | and M428L and N434S |
| | EWESFGTEWSNYKTTPPVLDSDGSFFLYSKLTVSKEEWQQGFVFSCSVLH | mutations |
| | EALHSHYTQKSLSLSPGK | |
| 2470 | APELLGGPSVFLEPPKPKDTLMISRTPEVTCVVVDVSHEDPEVKFNWYVDG | Clone CH3C.35.23.1.1 |
| | VEVHNAKTKPREEQYNSTYRVVSVLTVLHQDWLNGKEYKCKVSNKALP | with hole and M428L |
| | APIEKTISKAKGQPREPQVYTLPPSRDELTKNQVSLSCAVKGFYPSDIAVEW | and N434S mutations |
| | ESEGTEWSNYKTTPPVLDSDGSFFLVSKLTVSKEEWQQGFVFSCSVLHEAL | |
| | HSHYTQKSLSLSPGK | |
| 2471 | APEAAGGPSVFLEPPKPKDTLMISRTPEVTCVVVDVSHEDPEVKFNWYVD | Clone CH3C.35.23.1.1 |
| | GVEVHNAKTKPREEQYNSTYRVVSVLTVLHQDWLNGKEYKCKVSNKAL | with hole, LALA, and |
| | PAPIEKTISKAKGQPREPQVYTLPPSRDELTKNQVSLSCAVKGFYPSDIAVE | M428L and N434S |
| | WESFGTEWSNYKTTPPVLDSDGSFFLVSKLTVSKEEWQQGFVFSCSVLHE | mutations |
| | ALHSHYTQKSLSLSPGK | |
| 2472 | APEAAGGPSVFLEPPKPKDTLMISRTPEVTCVVVDVSHEDPEVKFNWYVD | Clone CH3C.35.23.1.1 |
| | GVEVHNAKTKPREEQYNSTYRVVSVLTVLHQDWLNGKEYKCKVSNKAL | with hole, LALAPG, |
| | GAPIEKTISKAKGQPREPQVYTLPPSRDELTKNQVSLSCAVKGFYPSDIAVE | and M428L and N434S |
| | WESFGTEWSNYKTTPPVLDSDGSFFLVSKLTVSKEEWQQGFVFSCSVLHE | mutations |
| | ALHSHYTQKSLSLSPGK | |
| 2473 | APELLGGPSVFLEPPKPKDTLMISRTPEVTCVVVDVSHEDPEVKFNWYVDG | Clone CH3C.35.23.2 |
| | VEVHNAKTKPREEQYNSTYRVVSVLTVLHQDWLNGKEYKCKVSNKALP | with M428L and N434S |
| | APIEKTISKAKGQPREPQVYTLPPSRDELTKNQVSLTCLVKGFYPSDIAVEW | mutations |
| | ESYGTEWANYKTTPPVLDSDGSFFLYSKLTVTKEEWQQGFVFSCSVLHEA | |
| | LHSHYTQKSLSLSPGK | |
| 2474 | APELLGGPSVFLEPPKPKDTLMISRTPEVTCVVVDVSHEDPEVKFNWYVDG | Clone CH3C.35.23.2 |
| | VEVHNAKTKPREEQYNSTYRVVSVLTVLHQDWLNGKEYKCKVSNKALP | with knob and M428L |
| | APIEKTISKAKGQPREPQVYTLPPSRDELTKNQVSLWCLVKGFYPSDIAVE | and N434S mutations |
| | WESYGTEWANYKTTPPVLDSDGSFFLYSKLTVTKEEWQQGFVFSCSVLHE | |
| | ALHSHYTQKSLSLSPGK | |
| 2475 | APEAAGGPSVFLEPPKPKDTLMISRTPEVTCVVVDVSHEDPEVKFNWYVD | Clone CH3C.35.23.2 |
| | GVEVHNAKTKPREEQYNSTYRVVSVLTVLHQDWLNGKEYKCKVSNKAL | with knob, LALA, and |
| | PAPIEKTISKAKGQPREPQVYTLPPSRDELTKNQVSLWCLVKGFYPSDIAVE | M428L and N434S |
| | WESYGTEWANYKTTPPVLDSDGSFFLYSKLTVTKEEWQQGFVFSCSVLHE | mutations |
| | ALHSHYTQKSLSLSPGK | |
| 2476 | APEAAGGPSVFLEPPKPKDTLMISRTPEVTCVVVDVSHEDPEVKFNWYVD | Clone CH3C.35.23.2 |
| | GVEVHNAKTKPREEQYNSTYRVVSVLTVLHQDWLNGKEYKCKVSNKAL | with knob, LALAPG, |
| | GAPIEKTISKAKGQPREPQVYTLPPSRDELTKNQVSLWCLVKGFYPSDIAV | and M428L and N434S |
| | EWESYGTEWANYKTTPPVLDSDGSFFLYSKLTVTKEEWQQGFVFSCSVLH | mutations |
| | EALHSHYTQKSLSLSPGK | |
| 2477 | APELLGGPSVFLEPPKPKDTLMISRTPEVTCVVVDVSHEDPEVKFNWYVDG | Clone CH3C.35.23.2 |
| | VEVHNAKTKPREEQYNSTYRVVSVLTVLHQDWLNGKEYKCKVSNKALP | with hole and M428L |
| | APIEKTISKAKGQPREPQVYTLPPSRDELTKNQVSLSCAVKGFYPSDIAVEW | and N434S mutations |
| | ESYGTEWANYKTTPPVLDSDGSFFLVSKLTVTKEEWQQGFVFSCSVLHEA | |
| | LHSHYTQKSLSLSPGK | |
| 2478 | APEAAGGPSVFLEPPKPKDTLMISRTPEVTCVVVDVSHEDPEVKFNWYVD | Clone CH3C.35.23.2 |
| | GVEVHNAKTKPREEQYNSTYRVVSVLTVLHQDWLNGKEYKCKVSNKAL | with hole, LALA, and |
| | PAPIEKTISKAKGQPREPQVYTLPPSRDELTKNQVSLSCAVKGFYPSDIAVE | M428L and N434S |
| | WESYGTEWANYKTTPPVLDSDGSFFLVSKLTVTKEEWQQGFVFSCSVLHE | mutations |
| | ALHSHYTQKSLSLSPGK | |
| 2479 | APEAAGGPSVFLFPPKPKDTLMISRTPEVTCVVVDVSHEDPEVKFNWYVD | Clone CH3C.35.23.2 |
| | GVEVHNAKTKPREEQYNSTYRVVSVLTVLHQDWLNGKEYKCKVSNKAL | with hole, LALAPG, |
| | GAPIEKTISKAKGQPREPQVYTLPPSRDELTKNQVSLSCAVKGFYPSDIAVE | and M428L and N434S |
| | WESYGTEWANYKTTPPVLDSDGSFFLVSKLTVTKEEWQQGFVFSCSVLHE | mutations |
| | ALHSHYTQKSLSLSPGK | |
| 2480 | APELLGGPSVFLFPPKPKDTLMISRTPEVTCVVVDVSHEDPEVKFNWYVDG | Clone CH3C.35.23.2.1 |
| | VEVHNAKTKPREEQYNSTYRVVSVLTVLHQDWLNGKEYKCKVSNKALP | with M428L and N434S |
| | APIEKTISKAKGQPREPQVYTLPPSRDELTKNQVSLTCLVKGFYPSDIAVEW | mutations |
| | ESYGTEWANYKTTPPVLDSDGSFFLYSKLTVSKSEWQQGFVFSCSVLHEA | |
| | LHSHYTQKSLSLSPGK | |
| 2481 | APELLGGPSVFLFPPKPKDTLMISRTPEVTCVVVDVSHEDPEVKFNWYVDG | Clone CH3C.35.23.2.1 |
| | VEVHNAKTKPREEQYNSTYRVVSVLTVLHQDWLNGKEYKCKVSNKALP | with knob and M428L |
| | APIEKTISKAKGQPREPQVYTLPPSRDELTKNQVSLWCLVKGFYPSDIAVE | and N434S mutations |
| | WESYGTEWANYKTTPPVLDSDGSFFLYSKLTVSKSEWQQGFVFSCSVLHE | |
| | ALHSHYTQKSLSLSPGK | |
| 2482 | APEAAGGPSVFLFPPKPKDTLMISRTPEVTCVVVDVSHEDPEVKFNWYVD | Clone CH3C.35.23.2.1 |
| | GVEVHNAKTKPREEQYNSTYRVVSVLTVLHQDWLNGKEYKCKVSNKAL | with knob, LALA, and |
| | PAPIEKTISKAKGQPREPQVYTLPPSRDELTKNQVSLWCLVKGFYPSDIAVE | M428L and N434S |
| | WESYGTEWANYKTTPPVLDSDGSFFLYSKLTVSKSEWQQGFVFSCSVLHE | mutations |
| | ALHSHYTQKSLSLSPGK | |
| 2483 | APEAAGGPSVFLFPPKPKDTLMISRTPEVTCVVVDVSHEDPEVKFNWYVD | Clone CH3C.35.23.2.1 |
| | GVEVHNAKTKPREEQYNSTYRVVSVLTVLHQDWLNGKEYKCKVSNKAL | with knob, LALAPG, |
| | GAPIEKTISKAKGQPREPQVYTLPPSRDELTKNQVSLWCLVKGFYPSDIAV | and M428L and N434S |
| | EWESYGTEWANYKTTPPVLDSDGSFFLYSKLTVSKSEWQQGFVFSCSVLH | mutations |
| | EALHSHYTQKSLSLSPGK | |
| 2484 | APELLGGPSVFLFPPKPKDTLMISRTPEVTCVVVDVSHEDPEVKFNWYVDG | Clone CH3C.35.23.2.1 |
| | VEVHNAKTKPREEQYNSTYRVVSVLTVLHQDWLNGKEYKCKVSNKALP | with hole and M428L |
| | APIEKTISKAKGQPREPQVYTLPPSRDELTKNQVSLSCAVKGFYPSDIAVEW | and N434S mutations |
| | ESYGTEWANYKTTPPVLDSDGSFFLVSKLTVSKSEWQQGFVFSCSVLHEA | |
| | LHSHYTQKSLSLSPGK | |
| 2485 | APEAAGGPSVFLFPPKPKDTLMISRTPEVTCVVVDVSHEDPEVKFNWYVD | Clone CH3C.35.23.2.1 |
| | GVEVHNAKTKPREEQYNSTYRVVSVLTVLHQDWLNGKEYKCKVSNKAL | with hole, LALA, and |
| | PAPIEKTISKAKGQPREPQVYTLPPSRDELTKNQVSLSCAVKGFYPSDIAVE | M428L and N434S |
| | WESYGTEWANYKTTPPVLDSDGSFFLVSKLTVSKSEWQQGFVFSCSVLHE | mutations |
| | ALHSHYTQKSLSLSPGK | |
| 2486 | APEAAGGPSVFLFPPKPKDTLMISRTPEVTCVVVDVSHEDPEVKFNWYVD | Clone CH3C.35.23.2.1 |
| | GVEVHNAKTKPREEQYNSTYRVVSVLTVLHQDWLNGKEYKCKVSNKAL | with hole, LALAPG, |
| | GAPIEKTISKAKGQPREPQVYTLPPSRDELTKNQVSLSCAVKGFYPSDIAVE | and M428L and N434S |
| | WESYGTEWANYKTTPPVLDSDGSFFLVSKLTVSKSEWQQGFVFSCSVLHE | mutations |
| | ALHSHYTQKSLSLSPGK | |
| 2487 | APELLGGPSVFLFPPKPKDTLMISRTPEVTCVVVDVSHEDPEVKFNWYVDG | Clone CH3C.35.23.3 |
| | VEVHNAKTKPREEQYNSTYRVVSVLTVLHQDWLNGKEYKCKVSNKALP | with M428L and N434S |
| | APIEKTISKAKGQPREPQVYTLPPSRDELTKNQVSLTCLVKGFYPSDIAVEW | mutations |
| | ESYGTEWVNYKTTPPVLDSDGSFFLYSKLTVTKEEWQQGFVFSCSVLHEA | |
| | LHSHYTQKSLSLSPGK | |
| 2488 | APELLGGPSVFLFPPKPKDTLMISRTPEVTCVVVDVSHEDPEVKFNWYVDG | Clone CH3C.35.23.3 |
| | VEVHNAKTKPREEQYNSTYRVVSVLTVLHQDWLNGKEYKCKVSNKALP | with knob and M428L |
| | APIEKTISKAKGQPREPQVYTLPPSRDELTKNQVSLWCLVKGFYPSDIAVE | and N434S mutations |
| | WESYGTEWVNYKTTPPVLDSDGSFFLYSKLTVTKEEWQQGFVFSCSVLHE | |
| | ALHSHYTQKSLSLSPGK | |
| 2489 | APEAAGGPSVFLFPPKPKDTLMISRTPEVTCVVVDVSHEDPEVKFNWYVD | Clone CH3C.35.23.3 |
| | GVEVHNAKTKPREEQYNSTYRVVSVLTVLHQDWLNGKEYKCKVSNKAL | with knob, LALA, and |
| | PAPIEKTISKAKGQPREPQVYTLPPSRDELTKNQVSLWCLVKGFYPSDIAVE | M428L and N434S |
| | WESYGTEWVNYKTTPPVLDSDGSFFLYSKLTVTKEEWQQGFVFSCSVLHE | mutations |
| | ALHSHYTQKSLSLSPGK | |
| 2490 | APEAAGGPSVFLFPPKPKDTLMISRTPEVTCVVVDVSHEDPEVKFNWYVD | Clone CH3C.35.23.3 |
| | GVEVHNAKTKPREEQYNSTYRVVSVLTVLHQDWLNGKEYKCKVSNKAL | with knob, LALAPG, |
| | GAPIEKTISKAKGQPREPQVYTLPPSRDELTKNQVSLWCLVKGFYPSDIAV | and M428L and N434S |
| | EWESYGTEWVNYKTTPPVLDSDGSFFLYSKLTVTKEEWQQGFVFSCSVLH | mutations |
| | EALHSHYTQKSLSLSPGK | |
| 2491 | APELLGGPSVFLFPPKPKDTLMISRTPEVTCVVVDVSHEDPEVKFNWYVDG | Clone CH3C.35.23.3 |
| | VEVHNAKTKPREEQYNSTYRVVSVLTVLHQDWLNGKEYKCKVSNKALP | with hole and M428L |
| | APIEKTISKAKGQPREPQVYTLPPSRDELTKNQVSLSCAVKGFYPSDIAVEW | and N434S mutations |
| | ESYGTEWVNYKTTPPVLDSDGSFFLVSKLTVTKEEWQQGFVFSCSVLHEA | |
| | LHSHYTQKSLSLSPGK | |
| 2492 | APEAAGGPSVFLFPPKPKDTLMISRTPEVTCVVVDVSHEDPEVKFNWYVD | Clone CH3C.35.23.3 |
| | GVEVHNAKTKPREEQYNSTYRVVSVLTVLHQDWLNGKEYKCKVSNKAL | with hole, LALA, and |
| | PAPIEKTISKAKGQPREPQVYTLPPSRDELTKNQVSLSCAVKGFYPSDIAVE | M428L and N434S |
| | WESYGTEWVNYKTTPPVLDSDGSFFLVSKLTVTKEEWQQGFVFSCSVLHE | mutations |
| | ALHSHYTQKSLSLSPGK | |
| 2493 | APEAAGGPSVFLFPPKPKDTLMISRTPEVTCVVVDVSHEDPEVKFNWYVD | Clone CH3C.35.23.3 |
| | GVEVHNAKTKPREEQYNSTYRVVSVLTVLHQDWLNGKEYKCKVSNKAL | with hole, LALAPG, |
| | GAPIEKTISKAKGQPREPQVYTLPPSRDELTKNQVSLSCAVKGFYPSDIAVE | and M428L and N434S |
| | WESYGTEWVNYKTTPPVLDSDGSFFLVSKLTVTKEEWQQGFVFSCSVLHE | mutations |
| | ALHSHYTQKSLSLSPGK | |
| 2494 | APELLGGPSVFLFPPKPKDTLMISRTPEVTCVVVDVSHEDPEVKFNWYVDG | Clone CH3C.35.23.4 |
| | VEVHNAKTKPREEQYNSTYRVVSVLTVLHQDWLNGKEYKCKVSNKALP | with M428L and N434S |
| | APIEKTISKAKGQPREPQVYTLPPSRDELTKNQVSLTCLVKGFYPSDIAVEW | mutations |
| | ESYGTEWSNYKTTPPVLDSDGSFFLYSKLTVSKEEWQQGFVFSCSVLHEAL | |
| | HSHYTQKSLSLSPGK | |
| 2495 | APELLGGPSVFLFPPKPKDTLMISRTPEVTCVVVDVSHEDPEVKFNWYVDG | Clone CH3C.35.23.4 |
| | VEVHNAKTKPREEQYNSTYRVVSVLTVLHQDWLNGKEYKCKVSNKALP | with knob and M428L |
| | APIEKTISKAKGQPREPQVYTLPPSRDELTKNQVSLWCLVKGFYPSDIAVE | and N434S mutations |
| | WESYGTEWSNYKTTPPVLDSDGSFFLYSKLTVSKEEWQQGFVFSCSVLHE | |
| | ALHSHYTQKSLSLSPGK | |
| 2496 | APEAAGGPSVFLFPPKPKDTLMISRTPEVTCVVVDVSHEDPEVKFNWYVD | Clone CH3C.35.23.4 |
| | GVEVHNAKTKPREEQYNSTYRVVSVLTVLHQDWLNGKEYKCKVSNKAL | with knob, LALA, |
| | PAPIEKTISKAKGQPREPQVYTLPPSRDELTKNQVSLWCLVKGFYPSDIAVE | and M428L and N434S |
| | WESYGTEWSNYKTTPPVLDSDGSFFLYSKLTVSKEEWQQGFVFSCSVLHE | mutations |
| | ALHSHYTQKSLSLSPGK | |
| 2497 | APEAAGGPSVFLFPPKPKDTLMISRTPEVTCVVVDVSHEDPEVKFNWYVD | Clone CH3C.35.23.4 |
| | GVEVHNAKTKPREEQYNSTYRVVSVLTVLHQDWLNGKEYKCKVSNKAL | with knob, LALAPG, |
| | GAPIEKTISKAKGQPREPQVYTLPPSRDELTKNQVSLWCLVKGFYPSDIAV | and M428L and N434S |
| | EWESYGTEWSNYKTTPPVLDSDGSFFLYSKLTVSKEEWQQGFVFSCSVLH | mutations |
| | EALHSHYTQKSLSLSPGK | |
| 2498 | APELLGGPSVFLFPPKPKDTLMISRTPEVTCVVVDVSHEDPEVKFNWYVDG | Clone CH3C.35.23.4 |
| | VEVHNAKTKPREEQYNSTYRVVSVLTVLHQDWLNGKEYKCKVSNKALP | with hole and M428L |
| | APIEKTISKAKGQPREPQVYTLPPSRDELTKNQVSLSCAVKGFYPSDIAVEW | and N434S mutations |
| | ESYGTEWSNYKTTPPVLDSDGSFFLVSKLTVSKEEWQQGFVFSCSVLHEAL | |
| | HSHYTQKSLSLSPGK | |
| 2499 | APEAAGGPSVFLFPPKPKDTLMISRTPEVTCVVVDVSHEDPEVKFNWYVD | Clone CH3C.35.23.4 |
| | GVEVHNAKTKPREEQYNSTYRVVSVLTVLHQDWLNGKEYKCKVSNKAL | with hole, LALA, and |
| | PAPIEKTISKAKGQPREPQVYTLPPSRDELTKNQVSLSCAVKGFYPSDIAVE | M428L and N434S |
| | WESYGTEWSNYKTTPPVLDSDGSFFLVSKLTVSKEEWQQGFVFSCSVLHE | mutations |
| | ALHSHYTQKSLSLSPGK | |
| 2500 | APEAAGGPSVFLFPPKPKDTLMISRTPEVTCVVVDVSHEDPEVKFNWYVD | Clone CH3C.35.23.4 |
| | GVEVHNAKTKPREEQYNSTYRVVSVLTVLHQDWLNGKEYKCKVSNKAL | with hole, LALAPG, |
| | GAPIEKTISKAKGQPREPQVYTLPPSRDELTKNQVSLSCAVKGFYPSDIAVE | and M428L and N434S |
| | WESYGTEWSNYKTTPPVLDSDGSFFLVSKLTVSKEEWQQGFVFSCSVLHE | mutations |
| | ALHSHYTQKSLSLSPGK | |
| 2501 | APELLGGPSVFLFPPKPKDTLMISRTPEVTCVVVDVSHEDPEVKFNWYVDG | Fc sequence with hole |
| | VEVHNAKTKPREEQYNSTYRVVSVLTVLHQDWLNGKEYKCKVSNKALP | and M428L and N434S |
| | APIEKTISKAKGQPREPQVYTLPPSRDELTKNQVSLSCAVKGFYPSDIAVEW | mutations |
| | ESNGQPENNYKTTPPVLDSDGSFFLVSKLTVDKSRWQQGNVFSCSVLHEA | |
| | LHSHYTQKSLSLSPGK | |
| 2502 | APEAAGGPSVFLFPPKPKDTLMISRTPEVTCVVVDVSHEDPEVKFNWYVD | Fc sequence with hole, |
| | GVEVHNAKTKPREEQYNSTYRVVSVLTVLHQDWLNGKEYKCKVSNKAL | LALA, and M428L and |
| | PAPIEKTISKAKGQPREPQVYTLPPSRDELTKNQVSLSCAVKGFYPSDIAVE | N434S mutations |
| | WESNGQPENNYKTTPPVLDSDGSFFLVSKLTVDKSRWQQGNVFSCSVLHE | |
| | ALHSHYTQKSLSLSPGK | |
| 2503 | APELLGGPSVFLFPPKPKDTLMISRTPEVTCVVVDVSHEDPEVKFNWYVDG | Fc sequence with knob |
| | VEVHNAKTKPREEQYNSTYRVVSVLTVLHQDWLNGKEYKCKVSNKALP | and M428L and N434S |
| | APIEKTISKAKGQPREPQVYTLPPSRDELTKNQVSLWCLVKGFYPSDIAVE | mutations |
| | WESNGQPENNYKTTPPVLDSDGSFFLYSKLTVDKSRWQQGNVFSCSVLHE | |
| | ALHSHYTQKSLSLSPGK | |
| 2504 | APEAAGGPSVFLFPPKPKDTLMISRTPEVTCVVVDVSHEDPEVKFNWYVD | Fc sequence with knob, |
| | GVEVHNAKTKPREEQYNSTYRVVSVLTVLHQDWLNGKEYKCKVSNKAL | LALA, and M428L and |
| | PAPIEKTISKAKGQPREPQVYTLPPSRDELTKNQVSLWCLVKGFYPSDIAVE | N434S mutations |
| | WESNGQPENNYKTTPPVLDSDGSFFLYSKLTVDKSRWQQGNVFSCSVLHE | |
| | ALHSHYTQKSLSLSGK | |
| 2505 | MPALLSLVSLLSVLLMGCVAETGGSGHHHHHHSGTHNTTVFQGVAGQSL | SS2_NHis_TREM2 |
| | QVSCPYDSMKHWGRRKAWCRQLGEKGPCQRVVSTHNLWLLSFLRRWNG | |
| | STAITDDTLGGTLTITLRNLQPHDAGLYQCQSLHGSEADTLRKVLVEVLAD | |
| | PLDHRDAGDLWFPGESESFEDAHVEHSISRSLLEGEIPFPPTSAS | |

[0458] In some embodiments, each of the light chain variable regions and each of the heavy chain variable regions disclosed in in the above tables as well as specific combinations thereof and other embodiments of the anti-TREM2 antibody described in the '841 application and herein may be attached to the light chain constant regions (Table 4) and heavy chain constant regions (Table 5) to form complete antibody light and heavy chains, respectively, as further discussed below. Further, each of the generated heavy and light chain sequences may be combined to form a complete antibody structure. It should be understood that the heavy chain and light chain variable regions provided herein can also be attached to other constant domains having different sequences than the exemplary sequences listed herein.

H. PCT Patent Application Publication No. WO2019/118513A1

[0459] In some embodiments, the TREM2 agonist is an antibody or an antigen-binding fragment thereof, as described in PCT Patent Application Publication No. WO2019/118513A1 (“the '513 application”), which is incorporated by reference herein, in its entirety.

[0460] In some embodiments, the TREM2 binding agent comprises an antibody that comprises a light chain variable domain comprising a CDRL1, CDRL2, and CDRL3, and a heavy chain variable domain comprising a CDRH1, CDRH2, and CDRH3 disclosed in the '513 application specification. In some embodiments, the TREM2 binding agent comprises an antibody that comprises a light chain variable domain and a heavy chain variable domain disclosed in the '513 application specification.

[0461] In some embodiments, the antibody comprises a CDR-H1 comprising the sequence set forth in SEQ ID NO: 2514, a CDR-H2 comprising the sequence set forth in SEQ ID NO:2515, a CDR-H3 comprising the sequence set forth in SEQ ID NO:11, a CDR-L1 comprising the sequence set forth in SEQ ID NO: 2517, a CDR-L2 comprising the sequence set forth in SEQ ID NO: 2518, and a CDR-L3 comprising the sequence set forth in SEQ ID NO: 2519.

[0462] In some embodiments, the antibody is afucosylated and comprises the VH sequence shown in SEQ ID NO: 2506; the VL sequence shown in SEQ ID NO: 2507; and an active human IgG1 Fc region.

[0463] In some embodiments, the antibody comprises all 3 heavy chain CDRs of the sequence shown in SEQ ID NO:2512 and all 3 light chain CDRs of the sequence shown in SEQ ID NO:2513.

[0464] In some embodiments, the antibody comprises an A to T substitution at position 97 of the sequence shown in SEQ ID NO:2512; and a K to R substitution at position 98 of the sequence shown in SEQ ID NO:2512.

[0465] In some embodiments, the antibody comprises the VH sequence shown in SEQ ID NO: 2506, 2508, or 2510.

[0466] In some embodiments, the antibody comprises the VH sequence shown in SEQ ID NO: 2506, 2508, or 2510 and the VL sequence shown in SEQ ID NO: 2507, 2509, or 2511. In some embodiments, the antibody comprises the VH sequence shown in SEQ ID NO: 2506.

[0467] In some embodiments, the antibody comprises the VH sequence shown in SEQ TD NO: 2506 and the VL sequence shown in SEQ ID NO: 2507.

[0468] In some embodiments, the antibody is the 37012 antibody (see Table 16A).

[0469] In some embodiments, the antibody is an antibody having a VL, VH, full heavy chain sequence or full light chain sequence disclosed in Table 1A or a CDR sequence as disclosed in Table 1B of PCT Patent Application Publication No. WO2019/118513A1, which are reproduced below as Tables 16A and 16B respectively.

TABLE 16A

| SEQ | | |
|---|---|---|
| ID | | |
| NO: | Name | Sequence |
| 2506 | 37012 VH | EVQLLESGGGLVQPGGSLRL |
| | | SCAASGFTFSNYYMAWVRQA |
| | | PGKGLEWVSSLTNSGGSTYY |
| | | ADSVKGRFTISRDNSKNTLY |
| | | LQMNSLRAEDTAVYYCTREW |
| | | AGSGYFDYWGQGTLVTVSS |
| 2507 | 37012 VL | DIQMTQSPSSLSASVGDRVT |
| | | ITCKASQNVGNNLAWYQQKP |
| | | GKAPKLLIYYTSNRFTGVPS |
| | | RFSGSGSGTDFTLTISSLQP |
| | | EDFATYYCQRIYNSPWTFGQ |
| | | GTKLEIK |
| 2508 | 37013VH | EVQLLESGGGLVQPGGSLRL |
| | | SCAASGFTFSNYYMAWVRQA |
| | | PGKGLEWVSSLTNSGGSTYY |
| | | ADSVKGRFTISRDNSKNTLY |
| | | LQMNSLRAEDTAVYYCTREW |
| | | AGSGYFDYWGQGTLVTVSS |
| 2509 | 37013VL | DIQMTQSPSSLSASVGDRVT |
| | | MTCKASQNVGNNLAWYQQKP |
| | | GKAPKLLLYYTSNRFTGVPS |
| | | RFSGSGSGTDFTLTISSVQP |
| | | EDFATYYCQRIYNSPWTFGQ |
| | | GTKLELK |
| 2510 | 37014VH | EVQLLESGGGLVQPGGSLRL |
| | | SCAASGFTFSNYYMAWVRQA |
| | | PGKGLEWVASLTNSGGSTYY |
| | | ADSVKGRFTLSRDNSKNTLY |
| | | LQMNSLRAEDTAVYYCTREW |
| | | AGSGYFDYWGQGTLVTVSS |
| 2511 | 37014VL | DIQMTQSPSSLSASVGDRVT |
| | | ITCKASQNVGNNLAWYQQKP |
| | | GKAPKLLIYYTSNRFTGVPS |
| | | RFSGSGSGTDFTLTISSLQP |
| | | EDFATYYCQRIYNSPWTFGQ |
| | | GTKLEIK |
| 2512 | 37017VH | EVQLLESGGGLVQPGGSLRL |
| | | SCAASGFTFSNYYMAWVRQA |
| | | PGKGLEWVSSLTNSGGSTYY |
| | | ADSVKGRFTISRDNSKNTLY |
| | | LQMNSLRAEDTAVYYCAKEW |
| | | AGSGYFDYWGQGTLVTVSS |
| 2513 | 37017VL | DIQMTQSPSSLSASVGDRVT |
| | | ITCKASQNVGNNLAWYQQKP |
| | | GKAPKLLIYYTSNRFTGVPS |
| | | RFSGSGSGTDFTLTISSLQP |
| | | EDFATYYCQRIYNSPWTFGQ |
| | | GTKLEIK |
| 2529 | Full | EVQLLESGGGLVQPGGSLRL |
| | 37012_H | SCAASGFTFSNYYMAWVRQA |
| | | PGKGLEWVSSLTNSGGSTYY |
| | | ADSVKGRFTISRDNSKNTLY |
| | | LQMNSLRAEDTAVYYCTREW |
| | | AGSGYFDYWGQGTLVTVSSA |
| | | STKGPSVFPLAPSSKSTSGG |
| | | TAALGCLVKDYFPEPVTVSW |
| | | NSGALTSGVHTFPAVLQSSG |
| | | LYSLSSVVTVPSSSLGTQTY |
| | | ICNVNHKPSNTKVDKKVEPK |
| | | SCDKTHTCPPCPAPELLGGP |
| | | SVFLFPPKPKDTLMISRTPE |
| | | VTCVVVDVSHEDPEVKFNWY |
| | | VDGVEVHNAKTKPREEQYNS |
| | | TYRVVSVLTVLHQDWLNGKE |
| | | YKCKVSNKALPAPIEKTISK |
| | | AKGQPREPQVYTLPPSRDEL |
| | | TKNQVSLTCLVKGFYPSDIA |
| | | VEWESNGQPENNYKTTPPVL |
| | | DSDGSFFLYSKLTVDKSRWQ |
| | | QGNVFSCSVMHEALHNHYTQ |
| | | KSLSLSPGK |
| 2530 | Full | DIQMTQSPSSLSASVGDRVT |
| | 37012 | ITCKASQNVGNNLAWYQQKP |
| | L | GKAPKLLIYYTSNRFTGVPS |
| | | RFSGSGSGTDFTLTISSLQP |
| | | EDFATYYCQRIYNSPWTFGQ |
| | | GTKLEIKRTVAAPSVFIFPP |
| | | SDEQLKSGTASVVCLLNNFY |
| | | PREAKVQWKVDNALQSGNSQ |
| | | ESVTEQDSKDSTYSLSSTLT |
| | | LSKADYEKHKVYACEVTHQG |
| | | LSSPVTKSFNRGEC |
| 2531 | Full | EVQLLESGGGLVQPGGSLRL |
| | 37013_H | SCAASGFTFSNYYMAWVRQA |
| | | PGKGLEWVSSLTNSGGSTYY |
| | | ADSVKGRFTISRDNSKNTLY |
| | | LQMNSLRAEDTAVYYCTREW |
| | | AGSGYFDYWGQGTLVTVSSA |
| | | STKGPSVFPLAPSSKSTSGG |
| | | TAALGCLVKDYFPEPVTVSW |
| | | NSGALTSGVHTFPAVLQSSG |
| | | LYSLSSVVTVPSSSLGTQTY |
| | | ICNVNHKPSNTKVDKKVEPK |
| | | SCDKTHTCPPCPAPELLGGP |
| | | SVFLFPPKPKDTLMISRTPE |
| | | VTCVVVDVSHEDPEVKFNWY |
| | | VDGVEVHNAKTKPREEQYNS |
| | | TYRVVSVLTVLHQDWLNGKE |
| | | YKCKVSNKALPAPIEKTISK |
| | | AKGQPREPQVYTLPPSRDEL |
| | | TKNQVSLTCLVKGFYPSDIA |
| | | VEWESNGQPENNYKTTPPVL |
| | | DSDGSFFLYSKLTVDKSRWQ |
| | | QGNVFSCSVMHEALHNHYTQ |
| | | KSLSLSPGK |
| 2532 | Full | DIQMTQSPSSLSASVGDRVT |
| | 37013 | MTCKASQNVGNNLAWYQQKP |
| | L | GKAPKLLLYYTSNRFTGVPS |
| | | RFSGSGSGTDFTLTISSVQP |
| | | EDFATYYCQRIYNSPWTFGQ |
| | | GTKLELKRTVAAPSVFIFPP |
| | | SDEQLKSGTASVVCLLNNFY |
| | | PREAKVQWKVDNALQSGNSQ |
| | | ESVTEQDSKDSTYSLSSTLT |
| | | LSKADYEKHKVYACEVTHQG |
| | | LSSPVTKSFNRGEC |
| 2533 | Full | EVQLLESGGGLVQPGGSLRL |
| | 37014_H | SCAASGFTFSNYYMAWVRQA |
| | | PGKGLEWVASLTNSGGSTYY |
| | | ADSVKGRFTLSRDNSKNTLY |
| | | LQMNSLRAEDTAVYYCTREW |
| | | AGSGYFDYWGQGTLVTVSSA |
| | | STKGPSVFPLAPSSKSTSGG |
| | | TAALGCLVKDYFPEPVTVSW |
| | | NSGALTSGVHTFPAVLQSSG |
| | | LYSLSSVVTVPSSSLGTQTY |
| | | ICNVNHKPSNTKVDKKVEPK |
| | | SCDKTHTCPPCPAPELLGGP |
| | | SVFLFPPKPKDTLMISRTPE |
| | | VTCVVVDVSHEDPEVKFNWY |
| | | VDGVEVHNAKTKPREEQYNS |
| | | TYRVVSVLTVLHQDWLNGKE |
| | | YKCKVSNKALPAPIEKTISK |
| | | AKGQPREPQVYTLPPSRDEL |
| | | TKNQVSLTCLVKGFYPSDIA |
| | | VEWESNGQPENNYKTTPPVL |
| | | DSDGSFFLYSKLTVDKSRWQ |
| | | QGNVFSCSVMHEALHNHYTQ |
| | | KSLSLSPGK |
| 2534 | Full | DIQMTQSPSSLSASVGDRVT |
| | 37014 | ITCKASQNVGNNLAWYQQKP |
| | L | GKAPKLLIYYTSNRFTGVPS |
| | | RFSGSGSGTDFTLTISSLQP |
| | | EDFATYYCQRIYNSPWTFGQ |
| | | GTKLEIKRTVAAPSVFIFPP |
| | | SDEQLKSGTASVVCLLNNFY |
| | | PREAKVQWKVDNALQSGNSQ |
| | | ESVTEQDSKDSTYSLSSTLT |
| | | LSKADYEKHKVYACEVTHQG |
| | | LSSPVTKSFNRGEC |
| 2535 | Full | EVQLLESGGGLVQPGGSLRL |
| | 37017_H | SCAASGFTFSNYYMAWVRQA |
| | | PGKGLEWVSSLTNSGGSTYY |
| | | ADSVKGRFTISRDNSKNTLY |
| | | LQMNSLRAEDTAVYYCAKEW |
| | | AGSGYFDYWGQGTLVTVSSA |
| | | STKGPSVFPLAPSSKSTSGG |
| | | TAALGCLVKDYFPEPVTVSW |
| | | NSGALTSGVHTFPAVLQSSG |
| | | LYSLSSVVTVPSSSLGTQTY |
| | | ICNVNHKPSNTKVDKKVEPK |
| | | SCDKTHTCPPCPAPELLGGP |
| | | SVFLFPPKPKDTLMISRTPE |
| | | VTCVVVDVSHEDPEVKFNWY |
| | | VDGVEVHNAKTKPREEQYNS |
| | | TYRVVSVLTVLHQDWLNGKE |
| | | YKCKVSNKALPAPIEKTISK |
| | | AKGQPREPQVYTLPPSRDEL |
| | | TKNQVSLTCLVKGFYPSDIA |
| | | VEWESNGQPENNYKTTPPVL |
| | | DSDGSFFLYSKLTVDKSRWQ |
| | | QGNVFSCSVMHEALHNHYTQ |
| | | KSLSLSPGK |
| 2536 | Full | DIQMTQSPSSLSASVGDRVT |
| | 37017_L | ITCKASQNVGNNLAWYQQKP |
| | | GKAPKLLIYYTSNRFTGVP |
| | | SRFSGSGSGTDFTLTISS |
| | | LQPEDFATYYCQRIYNSPWT |
| | | FGQGTKLEIKRTVAAPSVFI |
| | | FPPSDEQLKSGTASVVCLLN |
| | | NFYPREAKVQWKVDNALQSG |
| | | NSQESVTEQDSKDSTYSLSS |
| | | TLTLSKADYEKHKVYACEVT |
| | | HQGLSSPVTKSFNRGEC |

TABLE 16B
CDR's of humanized antibodies

| CDR | Sequence | SEQ ID NO |
|---|---|---|
| CDR-H1 | FSNYYMA | 2514 |
| CDR-H2 | SLTNSGGSTY | 2515 |
| CDR-H3 | EWAGSGY | 2516 |
| CDR-L1 | NVGNNLA | 2517 |
| CDR-L2 | YTSNRFT | 2518 |
| CDR-L3 | RIYNSPW | 2519 |

[0470] In some embodiments, each of the light chain variable regions and each of the heavy chain variable regions disclosed in in the above tables as well as specific combinations thereof and other embodiments of the anti-TREM2 antibody described in the '513 application and herein may be attached to the light chain constant regions (Table 4) and heavy chain constant regions (Table 5) to form complete antibody light and heavy chains, respectively, as further discussed below. Further, each of the generated heavy and light chain sequences may be combined to form a complete antibody structure. It should be understood that the heavy chain and light chain variable regions provided herein can also be attached to other constant domains having different sequences than the exemplary sequences listed herein.

I. PCT Patent Application Publication No. WO2020/055975A1

[0471] In some embodiments, the TREM2 agonist is an antibody or an antigen-binding fragment thereof, as described in PCT Patent Application Publication No. WO2020/055975A1 (“the '975 application”), which is incorporated by reference herein, in its entirety.

[0472] In some embodiments, the TREM2 binding agent comprises an antibody that comprises a light chain variable domain comprising a CDRL1, CDRL2, and CDRL3, and a heavy chain variable domain comprising a CDRH1, CDRH2, and CDRH3 disclosed in the '975 application specification. In some embodiments, the TREM2 binding agent comprises an antibody that comprises a light chain variable domain and a heavy chain variable domain disclosed in the '975 application specification.

[0473] In some embodiments, the antibody comprises (a) a light chain variable region comprising an L1 derived from SEQ ID NO: 2539, an L2 derived from SEQ ID NO: 2539, an L3 derived from of SEQ ID NO: 2539, or any combination thereof, and/or (b) a heavy chain variable region comprising an H1 derived from SEQ ID NO: 2540, an H2 derived from SEQ ID NO: 2540, an H3 derived from SEQ ID NO: 2540, or any combination thereof.

[0474] In some embodiments, the antibody comprises (a) a light chain variable region comprising an L1 of SEQ ID NO: 2541, an L2 comprising the amino acid sequence IVS, an L3 of SEQ ID NO: 2542, or any combination thereof, and/or (b) a heavy chain variable region comprising an H1 comprising SEQ ID NO: 2543, an H2 comprising SEQ ID NO: 2544, an H3 comprising SEQ ID NO: 2545, or any combination thereof.

[0475] In some embodiments, the antibody comprises (a) a light chain variable region comprising an L1 derived from SEQ ID NO: 2546, an L2 derived from SEQ ID NO: 2546, an L3 derived from of SEQ ID NO: 2546, or any combination thereof, and/or (b) a heavy chain variable region comprising an H1 derived from SEQ ID NO: 2547, an H2 derived from SEQ ID NO: 2547, an H3 derived from of SEQ ID NO: 2547, or any combination thereof.

[0476] In some embodiments, the antibody comprises (a) a light chain variable region comprising an L1 of SEQ ID NO: 2548, an L2 comprising the amino acid sequence KVS, an L3 of SEQ ID NO: 2549, or any combination thereof, and/or (b) a heavy chain variable region comprising an H1 comprising SEQ ID NO: 2550, an H2 comprising SEQ ID NO: 2551, an H3 comprising SEQ ID NO: 2552, or any combination thereof.

[0477] In some embodiments, the antibody comprises (a) a light chain variable region comprising an L1 derived from SEQ ID NO: 2553, an L2 derived from SEQ ID NO: 2553, an L3 derived from of SEQ ID NO: 2553, or any combination thereof, and/or (b) a heavy chain variable region comprising an H1 derived from SEQ ID NO: 2554, an H2 derived from SEQ ID NO: 2554, an H3 derived from of SEQ ID NO: 2554, or any combination thereof.

[0478] In some embodiments, the antibody comprises (a) a light chain variable region comprising an L1 of SEQ ID NO: 2555, an L2 comprising the amino acid sequence KVS, an L3 of SEQ ID NO: 2556, or any combination thereof, and/or (b) a heavy chain variable region comprising an H1 comprising SEQ ID NO: 2557, an H2 comprising SEQ ID NO: 2558, an H3 comprising SEQ ID NO: 2559, or any combination thereof.

[0479] In some embodiments, the antibody comprises (a) a light chain variable region comprising an L1 derived from SEQ ID NO: 2560, an L2 derived from SEQ ID NO: 2560, an L3 derived from of SEQ ID NO: 2560, or any combination thereof, and/or (b) a heavy chain variable region comprising an H1 derived from SEQ ID NO: 2561, an H2 derived from SEQ ID NO: 2561, an H3 derived from of SEQ ID NO: 2561, or any combination thereof.

[0480] In some embodiments, the antibody comprises (a) a light chain variable region comprising an L1 of SEQ ID NO: 2562, an L2 comprising the amino acid sequence KVS, an L3 of SEQ ID NO: 2563, or any combination thereof, and/or (b) a heavy chain variable region comprising an H1 comprising SEQ ID NO: 2564, an H2 comprising SEQ ID NO: 2565, an H3 comprising SEQ ID NO: 2566, or any combination thereof.

[0481] In some embodiments, the antibody comprises (a) a light chain variable region comprising an L1 derived from SEQ ID NO: 2567, an L2 derived from SEQ ID NO: 2567, an L3 derived from of SEQ ID NO: 2567, or any combination thereof, and/or (b) a heavy chain variable region comprising an H1 derived from SEQ ID NO: 2568, an H2 derived from SEQ ID NO: 2568, an H3 derived from of SEQ ID NO: 2568, or any combination thereof. Compositions comprising the antibody, including but not limited to pharmaceutical compositions, are contemplated herein. In certain embodiments the antibody is a humanized antibody.

[0482] In some embodiments, the antibody comprises (a) a light chain variable region comprising an L1 of SEQ ID NO: 2569, an L2 comprising the amino acid sequence KVS, an L3 of SEQ ID NO: 2570, or any combination thereof, and/or (b) a heavy chain variable region comprising an H1 comprising SEQ ID NO: 2571, an H2 comprising SEQ ID NO: 2572, an H3 comprising SEQ ID NO: 2573, or any combination thereof.

[0483] In some embodiments, the antibody comprises (a) a light chain variable region comprising an L1 derived from SEQ ID NO: 2574, an L2 derived from SEQ ID NO: 2574, an L3 derived from of SEQ ID NO: 2574, or any combination thereof, and/or (b) a heavy chain variable region comprising an H1 derived from SEQ ID NO: 2575, an H2 derived from SEQ ID NO: 2575, an H3 derived from of SEQ ID NO: 2575, or any combination thereof.

[0484] In some embodiments, the antibody comprises (a) a light chain variable region comprising an L1 of SEQ ID NO: 2576, an L2 comprising the amino acid sequence WAS, an L3 of SEQ ID NO: 2577, or any combination thereof, and/or (b) a heavy chain variable region comprising an H1 comprising SEQ ID NO: 2578, an H2 comprising SEQ ID NO: 2579, an H3 comprising SEQ ID NO: 2580, or any combination thereof.

[0485] In some embodiments, the antibody is HJ23.4, HJ23.7, HJ23.8, HJ23.9, HJ23.10, or HJ23.13. In some embodiments, the antibody is a humanized antibody derived from HJ23.4, HJ23.7, HJ23.8, HJ23.9, HJ23.10, or HJ23.13. The accession number for the hybridoma that produced antibodies HJ23.4, HJ23.7, HJ23.8, HJ23.9, HJ23.10, and HJ23.13, and their respective light chain variable and heavy chain variable regions are noted below:

TABLE 17A

| Antibody | Light chain | Heavy chain |
|---|---|---|
| (ATCC # of the hybridoma) | variable region | variable region |
| HJ23.4 (PTA-125168) | SEQ ID NO: 2539 | SEQ ID NO: 2540 |
| HJ23.7 (PTA-125169) | SEQ ID NO: 2546 | SEQ ID NO: 2547 |
| HJ23.8 (PTA-125170) | SEQ ID NO: 2552 | SEQ ID NO: 2553 |
| HJ23.9 (PTA-125171) | SEQ ID NO: 2561 | SEQ ID NO: 2562 |
| HJ23.10 (PTA-125172) | SEQ ID NO: 2567 | SEQ ID NO: 2568 |
| HJ23.13 (PTA-125173) | SEQ ID NO: 2574 | SEQ ID NO: 2575 |

[0486] In some embodiments, the antibody is an antibody disclosed in Tables A and B or the summary table appended to Example 2 of PCT Patent Application Publication No. WO2020/055975A1, reproduced below as Tables 17B, 17C and 17D.

TABLE 17B

| | Light Chain HVR | | | Heavy Chain HVR | | |
|---|---|---|---|---|---|---|
| Antibody | L1 | L2 | L3 | H1 | H2 | H3 |
| 1 | SEQ ID NO: 2541 | | | | | |
| 2 | SEQ ID NO: 2541 | IVS | | | | |
| 3 | SEQ ID NO: 2541 | IVS | SEQ ID NO: 2542 | | | |
| 4 | | IVS | | | | |
| 5 | | IVS | SEQ ID NO: 2542 | | | |
| 6 | | | SEQ ID NO: 2542 | | | |
| 7 | SEQ ID NO: 2541 | | SEQ ID NO: 2542 | | | |
| 8 | | | | SEQ ID NO: 2543 | | |
| 9 | | | | SEQ ID NO: 2543 | SEQ ID NO: 2544 | |
| 10 | | | | SEQ ID NO: 2543 | SEQ ID NO: 2544 | SEQ ID NO: 2545 |
| 11 | | | | | SEQ ID NO: 2544 | |
| 12 | | | | | SEQ ID NO: 2544 | SEQ ID NO: 2545 |
| 13 | | | | | | SEQ ID NO: 2545 |
| 14 | | | | SEQ ID NO: 2543 | | SEQ ID NO: 2545 |
| 15 | SEQ ID NO: 2541 | | | SEQ ID NO: 2543 | | |
| 16 | SEQ ID NO: 2541 | | | SEQ ID NO: 2543 | SEQ ID NO: 2544 | |
| 17 | SEQ ID NO: 2541 | | | SEQ ID NO: 2543 | SEQ ID NO: 2544 | SEQ ID NO: 2545 |
| 18 | SEQ ID NO: 2541 | | | | SEQ ID NO: 2544 | |
| 19 | SEQ ID NO: 2541 | | | | SEQ ID NO: 2544 | SEQ ID NO: 2545 |
| 20 | SEQ ID NO: 2541 | | | | | SEQ ID NO: 2545 |
| 21 | SEQ ID NO: 2541 | | | SEQ ID NO: 2543 | | SEQ ID NO: 2545 |
| 22 | SEQ ID NO: 2541 | IVS | | SEQ ID NO: 2543 | | |
| 23 | SEQ ID NO: 2541 | IVS | | SEQ ID NO: 2543 | SEQ ID NO: 2544 | |
| 24 | SEQ ID NO: 2541 | IVS | | SEQ ID NO: 2543 | SEQ ID NO: 2544 | SEQ ID NO: 2545 |
| 25 | SEQ ID NO: 2541 | IVS | | | SEQ ID NO: 2544 | |
| 26 | SEQ ID NO: 2541 | IVS | | | SEQ ID NO: 2544 | SEQ ID NO: 2545 |
| 27 | SEQ ID NO: 2541 | IVS | | | | SEQ ID NO: 2545 |
| 28 | SEQ ID NO: 2541 | IVS | | SEQ ID NO: 2543 | | SEQ ID NO: 2545 |
| 29 | SEQ ID NO: 2541 | IVS | SEQ ID NO: 2542 | SEQ ID NO: 2543 | | |
| 30 | SEQ ID NO: 2541 | IVS | SEQ ID NO: 2542 | SEQ ID NO: 2543 | SEQ ID NO: 2544 | |
| 31 | SEQ ID NO: 2541 | IVS | SEQ ID NO: 2542 | SEQ ID NO: 2543 | SEQ ID NO: 2544 | SEQ ID NO: 2545 |
| 32 | SEQ ID NO: 2541 | IVS | SEQ ID NO: 2542 | | SEQ ID NO: 2544 | |
| 33 | SEQ ID NO: 2541 | IVS | SEQ ID NO: 2542 | | SEQ ID NO: 2544 | SEQ ID NO: 2545 |
| 34 | SEQ ID NO: 2541 | IVS | SEQ ID NO: 2542 | SEQ ID NO: 2543 | | SEQ ID NO: 2545 |
| 35 | SEQ ID NO: 2541 | IVS | SEQ ID NO: 2542 | | | SEQ ID NO: 2545 |
| 36 | | IVS | | SEQ ID NO: 2543 | | |
| 37 | | IVS | | SEQ ID NO: 2543 | SEQ ID NO: 2544 | |
| 38 | | IVS | | SEQ ID NO: 2543 | SEQ ID NO: 2544 | SEQ ID NO: 2545 |
| 39 | | IVS | | | SEQ ID NO: 2544 | |
| 40 | | IVS | | | SEQ ID NO: 2544 | SEQ ID NO: 2545 |
| 41 | | IVS | | | | SEQ ID NO: 2545 |
| 42 | | IVS | | SEQ ID NO: 2543 | | SEQ ID NO: 2545 |
| 43 | | IVS | SEQ ID NO: 2542 | SEQ ID NO: 2543 | | |
| 44 | | IVS | SEQ ID NO: 2542 | SEQ ID NO: 2543 | SEQ ID NO: 2544 | |
| 45 | | IVS | SEQ ID NO: 2542 | SEQ ID NO: 2543 | SEQ ID NO: 2544 | SEQ ID NO: 2545 |
| 46 | | IVS | SEQ ID NO: 2542 | | SEQ ID NO: 2544 | |
| 47 | | IVS | SEQ ID NO: 2542 | | SEQ ID NO: 2544 | SEQ ID NO: 2545 |
| 48 | | IVS | SEQ ID NO: 2542 | | | SEQ ID NO: 2545 |
| 49 | | IVS | SEQ ID NO: 2542 | SEQ ID NO: 2543 | | SEQ ID NO: 2545 |
| 50 | | | SEQ ID NO: 2542 | SEQ ID NO: 2543 | | |
| 51 | | | SEQ ID NO: 2542 | SEQ ID NO: 2543 | SEQ ID NO: 2544 | |
| 52 | | | SEQ ID NO: 2542 | SEQ ID NO: 2543 | SEQ ID NO: 2544 | SEQ ID NO: 2545 |
| 53 | | | SEQ ID NO: 2542 | | SEQ ID NO: 2544 | |
| 54 | | | SEQ ID NO: 2542 | | SEQ ID NO: 2544 | SEQ ID NO: 2545 |
| 55 | | | SEQ ID NO: 2542 | | | SEQ ID NO: 2545 |
| 56 | | | SEQ ID NO: 2542 | SEQ ID NO: 2543 | | SEQ ID NO: 2545 |
| 57 | SEQ ID NO: 2541 | | SEQ ID NO: 2542 | SEQ ID NO: 2543 | | |
| 58 | SEQ ID NO: 2541 | | SEQ ID NO: 2542 | SEQ ID NO: 2543 | SEQ ID NO: 2544 | |
| 59 | SEQ ID NO: 2541 | | SEQ ID NO: 2542 | SEQ ID NO: 2543 | SEQ ID NO: 2544 | SEQ ID NO: 2545 |
| 60 | SEQ ID NO: 2541 | | SEQ ID NO: 2542 | | SEQ ID NO: 2544 | |
| 61 | SEQ ID NO: 2541 | | SEQ ID NO: 2542 | | SEQ ID NO: 2544 | SEQ ID NO: 2545 |
| 62 | SEQ ID NO: 2541 | | SEQ ID NO: 2542 | | | SEQ ID NO: 2545 |
| 63 | SEQ ID NO: 2541 | | SEQ ID NO: 2542 | SEQ ID NO: 2543 | | SEQ ID NO: 2545 |
| 64 | SEQ ID NO: 2548 | | | | | |
| 65 | SEQ ID NO: 2548 | KVS | | | | |
| 66 | SEQ ID NO: 2548 | KVS | SEQ ID NO: 2549 | | | |
| 67 | | KVS | | | | |
| 68 | | KVS | SEQ ID NO: 2549 | | | |
| 69 | | | SEQ ID NO: 2549 | | | |
| 70 | SEQ ID NO: 2548 | | SEQ ID NO: 2549 | | | |
| 71 | | | | SEQ ID NO: 2550 | | |
| 72 | | | | SEQ ID NO: 2550 | SEQ ID NO: 2551 | |
| 73 | | | | SEQ ID NO: 2550 | SEQ ID NO: 2551 | SEQ ID NO: 2552 |
| 74 | | | | | SEQ ID NO: 2551 | |
| 75 | | | | | SEQ ID NO: 2551 | SEQ ID NO: 2552 |
| 76 | | | | | | SEQ ID NO: 2552 |
| 77 | | | | SEQ ID NO: 2550 | | SEQ ID NO: 2552 |
| 78 | SEQ ID NO: 2548 | | | SEQ ID NO: 2550 | | |
| 79 | SEQ ID NO: 2548 | | | SEQ ID NO: 2550 | SEQ ID NO: 2551 | |
| 80 | SEQ ID NO: 2548 | | | SEQ ID NO: 2550 | SEQ ID NO: 2551 | SEQ ID NO: 2552 |
| 81 | SEQ ID NO: 2548 | | | | SEQ ID NO: 2551 | |
| 82 | SEQ ID NO: 2548 | | | | SEQ ID NO: 2551 | SEQ ID NO: 2552 |
| 83 | SEQ ID NO: 2548 | | | | | SEQ ID NO: 2552 |
| 84 | SEQ ID NO: 2548 | | | SEQ ID NO: 2550 | | SEQ ID NO: 2552 |
| 85 | SEQ ID NO: 2548 | KVS | | SEQ ID NO: 2550 | | |
| 86 | SEQ ID NO: 2548 | KVS | | SEQ ID NO: 2550 | SEQ ID NO: 2551 | |
| 87 | SEQ ID NO: 2548 | KVS | | SEQ ID NO: 2550 | SEQ ID NO: 2551 | SEQ ID NO: 2552 |
| 88 | SEQ ID NO: 2548 | KVS | | | SEQ ID NO: 2551 | |
| 89 | SEQ ID NO: 2548 | KVS | | | SEQ ID NO: 2551 | SEQ ID NO: 2552 |
| 90 | SEQ ID NO: 2548 | KVS | | | | SEQ ID NO: 2552 |
| 91 | SEQ ID NO: 2548 | KVS | | SEQ ID NO: 2550 | | SEQ ID NO: 2552 |
| 92 | SEQ ID NO: 2548 | KVS | SEQ ID NO: 2549 | SEQ ID NO: 2550 | | |
| 93 | SEQ ID NO: 2548 | KVS | SEQ ID NO: 2549 | SEQ ID NO: 2550 | SEQ ID NO: 2551 | |
| 94 | SEQ ID NO: 2548 | KVS | SEQ ID NO: 2549 | SEQ ID NO: 2550 | SEQ ID NO: 2551 | SEQ ID NO: 2552 |
| 95 | SEQ ID NO: 2548 | KVS | SEQ ID NO: 2549 | | SEQ ID NO: 2551 | |
| 96 | SEQ ID NO: 2548 | KVS | SEQ ID NO: 2549 | | SEQ ID NO: 2551 | SEQ ID NO: 2552 |
| 97 | SEQ ID NO: 2548 | KVS | SEQ ID NO: 2549 | | | SEQ ID NO: 2552 |
| 98 | SEQ ID NO: 2548 | KVS | SEQ ID NO: 2549 | SEQ ID NO: 2550 | | SEQ ID NO: 2552 |
| 99 | | KVS | | SEQ ID NO: 2550 | | |
| 100 | | KVS | | SEQ ID NO: 2550 | SEQ ID NO: 2551 | |
| 101 | | KVS | | SEQ ID NO: 2550 | SEQ ID NO: 2551 | SEQ ID NO: 2552 |
| 102 | | KVS | | | SEQ ID NO: 2551 | |
| 103 | | KVS | | | SEQ ID NO: 2551 | SEQ ID NO: 2552 |
| 104 | | KVS | | | | SEQ ID NO: 2552 |
| 105 | | KVS | | SEQ ID NO: 2550 | | SEQ ID NO: 2552 |
| 106 | | KVS | SEQ ID NO: 2549 | SEQ ID NO: 2550 | | |
| 107 | | KVS | SEQ ID NO: 2549 | SEQ ID NO: 2550 | SEQ ID NO: 2551 | |
| 108 | | KVS | SEQ ID NO: 2549 | SEQ ID NO: 2550 | SEQ ID NO: 2551 | SEQ ID NO: 2552 |
| 109 | | KVS | SEQ ID NO: 2549 | | SEQ ID NO: 2551 | |
| 110 | | KVS | SEQ ID NO: 2549 | | SEQ ID NO: 2551 | SEQ ID NO: 2552 |
| 111 | | KVS | SEQ ID NO: 2549 | | | SEQ ID NO: 2552 |
| 112 | | KVS | SEQ ID NO: 2549 | SEQ ID NO: 2550 | | SEQ ID NO: 2552 |
| 113 | | | SEQ ID NO: 2549 | SEQ ID NO: 2550 | | |
| 114 | | | SEQ ID NO: 2549 | SEQ ID NO: 2550 | SEQ ID NO: 2551 | |
| 115 | | | SEQ ID NO: 2549 | SEQ ID NO: 2550 | SEQ ID NO: 2551 | SEQ ID NO: 2552 |
| 116 | | | SEQ ID NO: 2549 | | SEQ ID NO: 2551 | |
| 117 | | | SEQ ID NO: 2549 | | SEQ ID NO: 2551 | SEQ ID NO: 2552 |
| 118 | | | SEQ ID NO: 2549 | | | SEQ ID NO: 2552 |
| 119 | | | SEQ ID NO: 2549 | SEQ ID NO: 2550 | | SEQ ID NO: 2552 |
| 120 | SEQ ID NO: 2548 | | SEQ ID NO: 2549 | SEQ ID NO: 2550 | | |
| 121 | SEQ ID NO: 2548 | | SEQ ID NO: 2549 | SEQ ID NO: 2550 | SEQ ID NO: 2551 | |
| 122 | SEQ ID NO: 2548 | | SEQ ID NO: 2549 | SEQ ID NO: 2550 | SEQ ID NO: 2551 | SEQ ID NO: 2552 |
| 123 | SEQ ID NO: 2548 | | SEQ ID NO: 2549 | | SEQ ID NO: 2551 | |
| 124 | SEQ ID NO: 2548 | | SEQ ID NO: 2549 | | SEQ ID NO: 2551 | SEQ ID NO: 2552 |
| 125 | SEQ ID NO: 2548 | | SEQ ID NO: 2549 | | | SEQ ID NO: 2552 |
| 126 | SEQ ID NO: 2548 | | SEQ ID NO: 2549 | SEQ ID NO: 2550 | | SEQ ID NO: 2552 |
| 127 | SEQ ID NO: 2555 | | | | | |
| 128 | SEQ ID NO: 2555 | KVS | | | | |
| 129 | SEQ ID NO: 2555 | KVS | SEQ ID NO: 2556 | | | |
| 130 | | KVS | | | | |
| 131 | | KVS | SEQ ID NO: 2556 | | | |
| 132 | | | SEQ ID NO: 2556 | | | |
| 133 | SEQ ID NO: 2555 | | SEQ ID NO: 2556 | | | |
| 134 | | | | SEQ ID NO: 2557 | | |
| 135 | | | | SEQ ID NO: 2557 | SEQ ID NO: 2558 | |
| 136 | | | | SEQ ID NO: 2557 | SEQ ID NO: 2558 | SEQ ID NO: 2559 |
| 137 | | | | | SEQ ID NO: 2558 | |
| 138 | | | | | SEQ ID NO: 2558 | SEQ ID NO: 2559 |
| 139 | | | | | | SEQ ID NO: 2559 |
| 140 | | | | SEQ ID NO: 2557 | | SEQ ID NO: 2559 |
| 141 | SEQ ID NO: 2555 | | | SEQ ID NO: 2557 | | |
| 142 | SEQ ID NO: 2555 | | | SEQ ID NO: 2557 | SEQ ID NO: 2558 | |
| 143 | SEQ ID NO: 2555 | | | SEQ ID NO: 2557 | SEQ ID NO: 2558 | SEQ ID NO: 2559 |
| 144 | SEQ ID NO: 2555 | | | | SEQ ID NO: 2558 | |
| 145 | SEQ ID NO: 2555 | | | | SEQ ID NO: 2558 | SEQ ID NO: 2559 |
| 146 | SEQ ID NO: 2555 | | | | | SEQ ID NO: 2559 |
| 147 | SEQ ID NO: 2555 | | | SEQ ID NO: 2557 | | SEQ ID NO: 2559 |
| 148 | SEQ ID NO: 2555 | KVS | | SEQ ID NO: 2557 | | |
| 149 | SEQ ID NO: 2555 | KVS | | SEQ ID NO: 2557 | SEQ ID NO: 2558 | |
| 150 | SEQ ID NO: 2555 | KVS | | SEQ ID NO: 2557 | SEQ ID NO: 2558 | SEQ ID NO: 2559 |
| 151 | SEQ ID NO: 2555 | KVS | | | SEQ ID NO: 2558 | |
| 152 | SEQ ID NO: 2555 | KVS | | | SEQ ID NO: 2558 | SEQ ID NO: 2559 |
| 153 | SEQ ID NO: 2555 | KVS | | | | SEQ ID NO: 2559 |
| 154 | SEQ ID NO: 2555 | KVS | | SEQ ID NO: 2557 | | SEQ ID NO: 2559 |
| 155 | SEQ ID NO: 2555 | KVS | SEQ ID NO: 2556 | SEQ ID NO: 2557 | | |
| 156 | SEQ ID NO: 2555 | KVS | SEQ ID NO: 2556 | SEQ ID NO: 2557 | SEQ ID NO: 2558 | |
| 157 | SEQ ID NO: 2555 | KVS | SEQ ID NO: 2556 | SEQ ID NO: 2557 | SEQ ID NO: 2558 | SEQ ID NO: 2559 |
| 158 | SEQ ID NO: 2555 | KVS | SEQ ID NO: 2556 | | SEQ ID NO: 2558 | |
| 159 | SEQ ID NO: 2555 | KVS | SEQ ID NO: 2556 | | SEQ ID NO: 2558 | SEQ ID NO: 2559 |
| 160 | SEQ ID NO: 2555 | KVS | SEQ ID NO: 2556 | SEQ ID NO: 2557 | | SEQ ID NO: 2559 |
| 161 | SEQ ID NO: 2555 | KVS | SEQ ID NO: 2556 | | | SEQ ID NO: 2559 |
| 162 | | KVS | | SEQ ID NO: 2557 | | |
| 163 | | KVS | | SEQ ID NO: 2557 | SEQ ID NO: 2558 | |
| 164 | | KVS | | SEQ ID NO: 2557 | SEQ ID NO: 2558 | SEQ ID NO: 2559 |
| 165 | | KVS | | | SEQ ID NO: 2558 | |
| 166 | | KVS | | | SEQ ID NO: 2558 | SEQ ID NO: 2559 |
| 167 | | KVS | | | | SEQ ID NO: 2559 |
| 168 | | KVS | | SEQ ID NO: 2557 | | SEQ ID NO: 2559 |
| 169 | | KVS | SEQ ID NO: 2556 | SEQ ID NO: 2557 | | |
| 170 | | KVS | SEQ ID NO: 2556 | SEQ ID NO: 2557 | SEQ ID NO: 2558 | |
| 171 | | KVS | SEQ ID NO: 2556 | SEQ ID NO: 2557 | SEQ ID NO: 2558 | SEQ ID NO: 2559 |
| 172 | | KVS | SEQ ID NO: 2556 | | SEQ ID NO: 2558 | |
| 173 | | KVS | SEQ ID NO: 2556 | | SEQ ID NO: 2558 | SEQ ID NO: 2559 |
| 174 | | KVS | SEQ ID NO: 2556 | | | SEQ ID NO: 2559 |
| 175 | | KVS | SEQ ID NO: 2556 | SEQ ID NO: 2557 | | SEQ ID NO: 2559 |
| 176 | | | SEQ ID NO: 2556 | SEQ ID NO: 2557 | | |
| 177 | | | SEQ ID NO: 2556 | SEQ ID NO: 2557 | SEQ ID NO: 2558 | |
| 178 | | | SEQ ID NO: 2556 | SEQ ID NO: 2557 | SEQ ID NO: 2558 | SEQ ID NO: 2559 |
| 179 | | | SEQ ID NO: 2556 | | SEQ ID NO: 2558 | |
| 180 | | | SEQ ID NO: 2556 | | SEQ ID NO: 2558 | SEQ ID NO: 2559 |
| 181 | | | SEQ ID NO: 2556 | | | SEQ ID NO: 2559 |
| 182 | | | SEQ ID NO: 2556 | SEQ ID NO: 2557 | | SEQ ID NO: 2559 |
| 183 | SEQ ID NO: 2555 | | SEQ ID NO: 2556 | SEQ ID NO: 2557 | | |
| 184 | SEQ ID NO: 2555 | | SEQ ID NO: 2556 | SEQ ID NO: 2557 | SEQ ID NO: 2558 | |
| 185 | SEQ ID NO: 2555 | | SEQ ID NO: 2556 | SEQ ID NO: 2557 | SEQ ID NO: 2558 | SEQ ID NO: 2559 |
| 186 | SEQ ID NO: 2555 | | SEQ ID NO: 2556 | | SEQ ID NO: 2558 | |
| 187 | SEQ ID NO: 2555 | | SEQ ID NO: 2556 | | SEQ ID NO: 2558 | SEQ ID NO: 2559 |
| 188 | SEQ ID NO: 2555 | | SEQ ID NO: 2556 | | | SEQ ID NO: 2559 |
| 189 | SEQ ID NO: 2555 | | SEQ ID NO: 2556 | SEQ ID NO: 2557 | | SEQ ID NO: 2559 |
| 190 | SEQ ID NO: 2562 | | | | | |
| 191 | SEQ ID NO: 2562 | KVS | | | | |
| 192 | SEQ ID NO: 2562 | KVS | SEQ ID NO: 25 | | | |
| 193 | | KVS | | | | |
| 194 | | KVS | SEQ ID NO: 25 | | | |
| 195 | | | SEQ ID NO: 25 | | | |
| 196 | SEQ ID NO: 2562 | | SEQ ID NO: 25 | | | |
| 197 | | | | SEQ ID NO: 2564 | | |
| 198 | | | | SEQ ID NO: 2564 | SEQ ID NO: 2565 | |
| 199 | | | | SEQ ID NO: 2564 | SEQ ID NO: 2565 | SEQ ID NO: 2566 |
| 200 | | | | | SEQ ID NO: 2565 | |
| 201 | | | | | SEQ ID NO: 2565 | SEQ ID NO: 2566 |
| 202 | | | | | | SEQ ID NO: 2566 |
| 203 | | | | SEQ ID NO: 2564 | | SEQ ID NO: 2566 |
| 204 | SEQ ID NO: 2562 | | | SEQ ID NO: 2564 | | |
| 205 | SEQ ID NO: 2562 | | | SEQ ID NO: 2564 | SEQ ID NO: 2565 | |
| 206 | SEQ ID NO: 2562 | | | SEQ ID NO: 2564 | SEQ ID NO: 2565 | SEQ ID NO: 2566 |
| 207 | SEQ ID NO: 2562 | | | | SEQ ID NO: 2565 | |
| 208 | SEQ ID NO: 2562 | | | | SEQ ID NO: 2565 | SEQ ID NO: 2566 |
| 209 | SEQ ID NO: 2562 | | | | | SEQ ID NO: 2566 |
| 210 | SEQ ID NO: 2562 | | | SEQ ID NO: 2564 | | SEQ ID NO: 2566 |
| 211 | SEQ ID NO: 2562 | KVS | | SEQ ID NO: 2564 | | |
| 212 | SEQ ID NO: 2562 | KVS | | SEQ ID NO: 2564 | SEQ ID NO: 2565 | |
| 213 | SEQ ID NO: 2562 | KVS | | SEQ ID NO: 2564 | SEQ ID NO: 2565 | SEQ ID NO: 2566 |
| 214 | SEQ ID NO: 2562 | KVS | | | SEQ ID NO: 2565 | |
| 215 | SEQ ID NO: 2562 | KVS | | | SEQ ID NO: 2565 | SEQ ID NO: 2566 |
| 216 | SEQ ID NO: 2562 | KVS | | | | SEQ ID NO: 2566 |
| 217 | SEQ ID NO: 2562 | KVS | | SEQ ID NO: 2564 | | SEQ ID NO: 2566 |
| 218 | SEQ ID NO: 2562 | KVS | SEQ ID NO: 25 | SEQ ID NO: 2564 | | |
| 219 | SEQ ID NO: 2562 | KVS | SEQ ID NO: 25 | SEQ ID NO: 2564 | SEQ ID NO: 2565 | |
| 220 | SEQ ID NO: 2562 | KVS | SEQ ID NO: 25 | SEQ ID NO: 2564 | SEQ ID NO: 2565 | SEQ ID NO: 2566 |
| 221 | SEQ ID NO: 2562 | KVS | SEQ ID NO: 25 | | SEQ ID NO: 2565 | |
| 222 | SEQ ID NO: 2562 | KVS | SEQ ID NO: 25 | | SEQ ID NO: 2565 | SEQ ID NO: 2566 |
| 223 | SEQ ID NO: 2562 | KVS | SEQ ID NO: 25 | SEQ ID NO: 2564 | | SEQ ID NO: 2566 |
| 224 | SEQ ID NO: 2562 | KVS | SEQ ID NO: 25 | | | SEQ ID NO: 2566 |
| 225 | | KVS | | SEQ ID NO: 2564 | | |
| 226 | | KVS | | SEQ ID NO: 2564 | SEQ ID NO: 2565 | |
| 227 | | KVS | | SEQ ID NO: 2564 | SEQ ID NO: 2565 | SEQ ID NO: 2566 |
| 228 | | KVS | | | SEQ ID NO: 2565 | |
| 229 | | KVS | | | SEQ ID NO: 2565 | SEQ ID NO: 2566 |
| 230 | | KVS | | | | SEQ ID NO: 2566 |
| 231 | | KVS | | SEQ ID NO: 2564 | | SEQ ID NO: 2566 |
| 232 | | KVS | SEQ ID NO: 25 | SEQ ID NO: 2564 | | |
| 233 | | KVS | SEQ ID NO: 25 | SEQ ID NO: 2564 | SEQ ID NO: 2565 | |
| 234 | | KVS | SEQ ID NO: 25 | SEQ ID NO: 2564 | SEQ ID NO: 2565 | SEQ ID NO: 2566 |
| 235 | | KVS | SEQ ID NO: 25 | | SEQ ID NO: 2565 | |
| 236 | | KVS | SEQ ID NO: 25 | | SEQ ID NO: 2565 | SEQ ID NO: 2566 |
| 237 | | KVS | SEQ ID NO: 25 | | | SEQ ID NO: 2566 |
| 238 | | KVS | SEQ ID NO: 25 | SEQ ID NO: 2564 | | SEQ ID NO: 2566 |
| 239 | | | SEQ ID NO: 25 | SEQ ID NO: 2564 | | |
| 240 | | | SEQ ID NO: 25 | SEQ ID NO: 2564 | SEQ ID NO: 2565 | |
| 241 | | | SEQ ID NO: 25 | SEQ ID NO: 2564 | SEQ ID NO: 2565 | SEQ ID NO: 2566 |
| 242 | | | SEQ ID NO: 25 | | SEQ ID NO: 2565 | |
| 243 | | | SEQ ID NO: 25 | | SEQ ID NO: 2565 | SEQ ID NO: 2566 |
| 244 | | | SEQ ID NO: 25 | | | SEQ ID NO: 2566 |
| 245 | | | SEQ ID NO: 25 | SEQ ID NO: 2564 | | SEQ ID NO: 2566 |
| 246 | SEQ ID NO: 2562 | | SEQ ID NO: 25 | SEQ ID NO: 2564 | | |
| 247 | SEQ ID NO: 2562 | | SEQ ID NO: 25 | SEQ ID NO: 2564 | SEQ ID NO: 2565 | |
| 248 | SEQ ID NO: 2562 | | SEQ ID NO: 25 | SEQ ID NO: 2564 | SEQ ID NO: 2565 | SEQ ID NO: 2566 |
| 249 | SEQ ID NO: 2562 | | SEQ ID NO: 25 | | SEQ ID NO: 2565 | |
| 250 | SEQ ID NO: 2562 | | SEQ ID NO: 25 | | SEQ ID NO: 2565 | SEQ ID NO: 2566 |
| 251 | SEQ ID NO: 2562 | | SEQ ID NO: 25 | | | SEQ ID NO: 2566 |
| 252 | SEQ ID NO: 2562 | | SEQ ID NO: 25 | SEQ ID NO: 2564 | | SEQ ID NO: 2566 |
| 253 | SEQ ID NO: 2569 | | | | | |
| 254 | SEQ ID NO: 2569 | KVS | | | | |
| 255 | SEQ ID NO: 2569 | KVS | SEQ ID NO: 2570 | | | |
| 256 | | KVS | | | | |
| 257 | | KVS | SEQ ID NO: 2570 | | | |
| 258 | | | SEQ ID NO: 2570 | | | |
| 259 | SEQ ID NO: 2569 | | SEQ ID NO: 2570 | | | |
| 260 | | | | SEQ ID NO: 2571 | | |
| 261 | | | | SEQ ID NO: 2571 | SEQ ID NO: 2572 | |
| 262 | | | | SEQ ID NO: 2571 | SEQ ID NO: 2572 | SEQ ID NO: 2573 |
| 263 | | | | | SEQ ID NO: 2572 | |
| 264 | | | | | SEQ ID NO: 2572 | SEQ ID NO: 2573 |
| 265 | | | | | | SEQ ID NO: 2573 |
| 266 | | | | SEQ ID NO: 2571 | | SEQ ID NO: 2573 |
| 267 | SEQ ID NO: 2569 | | | SEQ ID NO: 2571 | | |
| 268 | SEQ ID NO: 2569 | | | SEQ ID NO: 2571 | SEQ ID NO: 2572 | |
| 269 | SEQ ID NO: 2569 | | | SEQ ID NO: 2571 | SEQ ID NO: 2572 | SEQ ID NO: 2573 |
| 270 | SEQ ID NO: 2569 | | | | SEQ ID NO: 2572 | |
| 271 | SEQ ID NO: 2569 | | | | SEQ ID NO: 2572 | SEQ ID NO: 2573 |
| 272 | SEQ ID NO: 2569 | | | | | SEQ ID NO: 2573 |
| 273 | SEQ ID NO: 2569 | | | SEQ ID NO: 2571 | | SEQ ID NO: 2573 |
| 274 | SEQ ID NO: 2569 | KVS | | SEQ ID NO: 2571 | | |
| 275 | SEQ ID NO: 2569 | KVS | | SEQ ID NO: 2571 | SEQ ID NO: 2572 | |
| 276 | SEQ ID NO: 2569 | KVS | | SEQ ID NO: 2571 | SEQ ID NO: 2572 | SEQ ID NO: 2573 |
| 277 | SEQ ID NO: 2569 | KVS | | | SEQ ID NO: 2572 | |
| 278 | SEQ ID NO: 2569 | KVS | | | SEQ ID NO: 2572 | SEQ ID NO: 2573 |
| 279 | SEQ ID NO: 2569 | KVS | | | | SEQ ID NO: 2573 |
| 280 | SEQ ID NO: 2569 | KVS | | SEQ ID NO: 2571 | | SEQ ID NO: 2573 |
| 281 | SEQ ID NO: 2569 | KVS | SEQ ID NO: 2570 | SEQ ID NO: 2571 | | |
| 282 | SEQ ID NO: 2569 | KVS | SEQ ID NO: 2570 | SEQ ID NO: 2571 | SEQ ID NO: 2572 | |
| 283 | SEQ ID NO: 2569 | KVS | SEQ ID NO: 2570 | SEQ ID NO: 2571 | SEQ ID NO: 2572 | SEQ ID NO: 2573 |
| 284 | SEQ ID NO: 2569 | KVS | SEQ ID NO: 2570 | | SEQ ID NO: 2572 | |
| 285 | SEQ ID NO: 2569 | KVS | SEQ ID NO: 2570 | | SEQ ID NO: 2572 | SEQ ID NO: 2573 |
| 286 | SEQ ID NO: 2569 | KVS | SEQ ID NO: 2570 | SEQ ID NO: 2571 | | SEQ ID NO: 2573 |
| 287 | SEQ ID NO: 2569 | KVS | SEQ ID NO: 2570 | | | SEQ ID NO: 2573 |
| 288 | | KVS | | SEQ ID NO: 2571 | | |
| 289 | | KVS | | SEQ ID NO: 2571 | SEQ ID NO: 2572 | |
| 290 | | KVS | | SEQ ID NO: 2571 | SEQ ID NO: 2572 | SEQ ID NO: 2573 |
| 291 | | KVS | | | SEQ ID NO: 2572 | |
| 292 | | KVS | | | SEQ ID NO: 2572 | SEQ ID NO: 2573 |
| 293 | | KVS | | | | SEQ ID NO: 2573 |
| 294 | | KVS | | SEQ ID NO: 2571 | | SEQ ID NO: 2573 |
| 295 | | KVS | SEQ ID NO: 2570 | SEQ ID NO: 2571 | | |
| 296 | | KVS | SEQ ID NO: 2570 | SEQ ID NO: 2571 | SEQ ID NO: 2572 | |
| 297 | | KVS | SEQ ID NO: 2570 | SEQ ID NO: 2571 | SEQ ID NO: 2572 | SEQ ID NO: 2573 |
| 298 | | KVS | SEQ ID NO: 2570 | | SEQ ID NO: 2572 | |
| 299 | | KVS | SEQ ID NO: 2570 | | SEQ ID NO: 2572 | SEQ ID NO: 2573 |
| 300 | | KVS | SEQ ID NO: 2570 | | | SEQ ID NO: 2573 |
| 301 | | KVS | SEQ ID NO: 2570 | SEQ ID NO: 2571 | | SEQ ID NO: 2573 |
| 302 | | | SEQ ID NO: 2570 | SEQ ID NO: 2571 | | |
| 303 | | | SEQ ID NO: 2570 | SEQ ID NO: 2571 | SEQ ID NO: 2572 | |
| 304 | | | SEQ ID NO: 2570 | SEQ ID NO: 2571 | SEQ ID NO: 2572 | SEQ ID NO: 2573 |
| 305 | | | SEQ ID NO: 2570 | | SEQ ID NO: 2572 | |
| 306 | | | SEQ ID NO: 2570 | | SEQ ID NO: 2572 | SEQ ID NO: 2573 |
| 307 | | | SEQ ID NO: 2570 | | | SEQ ID NO: 2573 |
| 308 | | | SEQ ID NO: 2570 | SEQ ID NO: 2571 | | SEQ ID NO: 2573 |
| 309 | SEQ ID NO: 2569 | | SEQ ID NO: 2570 | SEQ ID NO: 2571 | | |
| 310 | SEQ ID NO: 2569 | | SEQ ID NO: 2570 | SEQ ID NO: 2571 | SEQ ID NO: 2572 | |
| 311 | SEQ ID NO: 2569 | | SEQ ID NO: 2570 | SEQ ID NO: 2571 | SEQ ID NO: 2572 | SEQ ID NO: 2573 |
| 312 | SEQ ID NO: 2569 | | SEQ ID NO: 2570 | | SEQ ID NO: 2572 | |
| 313 | SEQ ID NO: 2569 | | SEQ ID NO: 2570 | | SEQ ID NO: 2572 | SEQ ID NO: 2573 |
| 314 | SEQ ID NO: 2569 | | SEQ ID NO: 2570 | | | SEQ ID NO: 2573 |
| 315 | SEQ ID NO: 2569 | | SEQ ID NO: 2570 | SEQ ID NO: 2571 | | SEQ ID NO: 2573 |
| 316 | SEQ ID NO: 2576 | | | | | |
| 317 | SEQ ID NO: 2576 | WAS | | | | |
| 318 | SEQ ID NO: 2576 | WAS | SEQ ID NO: 2577 | | | |
| 319 | | WAS | | | | |
| 320 | | WAS | SEQ ID NO: 2577 | | | |
| 321 | | | SEQ ID NO: 2577 | | | |
| 322 | SEQ ID NO: 2576 | | SEQ ID NO: 2577 | | | |
| 323 | | | | SEQ ID NO: 2578 | | |
| 324 | | | | SEQ ID NO: 2578 | SEQ ID NO: 2579 | |
| 325 | | | | SEQ ID NO: 2578 | SEQ ID NO: 2579 | SEQ ID NO: 2580 |
| 326 | | | | | SEQ ID NO: 2579 | |
| 327 | | | | | SEQ ID NO: 2579 | SEQ ID NO: 2580 |
| 328 | | | | | | SEQ ID NO: 2580 |
| 329 | | | | SEQ ID NO: 2578 | | SEQ ID NO: 2580 |
| 330 | SEQ ID NO: 2576 | | | SEQ ID NO: 2578 | | |
| 331 | SEQ ID NO: 2576 | | | SEQ ID NO: 2578 | SEQ ID NO: 2579 | |
| 332 | SEQ ID NO: 2576 | | | SEQ ID NO: 2578 | SEQ ID NO: 2579 | SEQ ID NO: 2580 |
| 333 | SEQ ID NO: 2576 | | | | SEQ ID NO: 2579 | |
| 334 | SEQ ID NO: 2576 | | | | SEQ ID NO: 2579 | SEQ ID NO: 2580 |
| 335 | SEQ ID NO: 2576 | | | | | SEQ ID NO: 2580 |
| 336 | SEQ ID NO: 2576 | | | SEQ ID NO: 2578 | | SEQ ID NO: 2580 |
| 337 | SEQ ID NO: 2576 | WAS | | SEQ ID NO: 2578 | | |
| 338 | SEQ ID NO: 2576 | WAS | | SEQ ID NO: 2578 | SEQ ID NO: 2579 | |
| 339 | SEQ ID NO: 2576 | WAS | | SEQ ID NO: 2578 | SEQ ID NO: 2579 | SEQ ID NO: 2580 |
| 340 | SEQ ID NO: 2576 | WAS | | | SEQ ID NO: 2579 | |
| 341 | SEQ ID NO: 2576 | WAS | | | SEQ ID NO: 2579 | SEQ ID NO: 2580 |
| 342 | SEQ ID NO: 2576 | WAS | | | | SEQ ID NO: 2580 |
| 343 | SEQ ID NO: 2576 | WAS | | SEQ ID NO: 2578 | | SEQ ID NO: 2580 |
| 344 | SEQ ID NO: 2576 | WAS | SEQ ID NO: 2577 | SEQ ID NO: 2578 | | |
| 345 | SEQ ID NO: 2576 | WAS | SEQ ID NO: 2577 | SEQ ID NO: 2578 | SEQ ID NO: 2579 | |
| 346 | SEQ ID NO: 2576 | WAS | SEQ ID NO: 2577 | SEQ ID NO: 2578 | SEQ ID NO: 2579 | SEQ ID NO: 2580 |
| 347 | SEQ ID NO: 2576 | WAS | SEQ ID NO: 2577 | | SEQ ID NO: 2579 | |
| 348 | SEQ ID NO: 2576 | WAS | SEQ ID NO: 2577 | | SEQ ID NO: 2579 | SEQ ID NO: 2580 |
| 349 | SEQ ID NO: 2576 | WAS | SEQ ID NO: 2577 | SEQ ID NO: 2578 | | SEQ ID NO: 2580 |
| 350 | SEQ ID NO: 2576 | WAS | SEQ ID NO: 2577 | | | SEQ ID NO: 2580 |
| 351 | | WAS | | SEQ ID NO: 2578 | | |
| 352 | | WAS | | SEQ ID NO: 2578 | SEQ ID NO: 2579 | |
| 353 | | WAS | | SEQ ID NO: 2578 | SEQ ID NO: 2579 | SEQ ID NO: 2580 |
| 354 | | WAS | | | SEQ ID NO: 2579 | |
| 355 | | WAS | | | SEQ ID NO: 2579 | SEQ ID NO: 2580 |
| 356 | | WAS | | | | SEQ ID NO: 2580 |
| 357 | | WAS | | SEQ ID NO: 2578 | | SEQ ID NO: 2580 |
| 358 | | WAS | SEQ ID NO: 2577 | SEQ ID NO: 2578 | | |
| 359 | | WAS | SEQ ID NO: 2577 | SEQ ID NO: 2578 | SEQ ID NO: 2579 | |
| 360 | | WAS | SEQ ID NO: 2577 | SEQ ID NO: 2578 | SEQ ID NO: 2579 | SEQ ID NO: 2580 |
| 361 | | WAS | SEQ ID NO: 2577 | | SEQ ID NO: 2579 | |
| 362 | | WAS | SEQ ID NO: 2577 | | SEQ ID NO: 2579 | SEQ ID NO: 2580 |
| 363 | | WAS | SEQ ID NO: 2577 | | | SEQ ID NO: 2580 |
| 364 | | WAS | SEQ ID NO: 2577 | SEQ ID NO: 2578 | | SEQ ID NO: 2580 |
| 365 | | | SEQ ID NO: 2577 | SEQ ID NO: 2578 | | |
| 366 | | | SEQ ID NO: 2577 | SEQ ID NO: 2578 | SEQ ID NO: 2579 | |
| 367 | | | SEQ ID NO: 2577 | SEQ ID NO: 2578 | SEQ ID NO: 2579 | SEQ ID NO: 2580 |
| 368 | | | SEQ ID NO: 2577 | | SEQ ID NO: 2579 | |
| 369 | | | SEQ ID NO: 2577 | | SEQ ID NO: 2579 | SEQ ID NO: 2580 |
| 370 | | | SEQ ID NO: 2577 | | | SEQ ID NO: 2580 |
| 371 | | | SEQ ID NO: 2577 | SEQ ID NO: 2578 | | SEQ ID NO: 2580 |
| 372 | SEQ ID NO: 2576 | | SEQ ID NO: 2577 | SEQ ID NO: 2578 | | |
| 373 | SEQ ID NO: 2576 | | SEQ ID NO: 2577 | SEQ ID NO: 2578 | SEQ ID NO: 2579 | |
| 374 | SEQ ID NO: 2576 | | SEQ ID NO: 2577 | SEQ ID NO: 2578 | SEQ ID NO: 2579 | SEQ ID NO: 2580 |
| 375 | SEQ ID NO: 2576 | | SEQ ID NO: 2577 | | SEQ ID NO: 2579 | |
| 376 | SEQ ID NO: 2576 | | SEQ ID NO: 2577 | | SEQ ID NO: 2579 | SEQ ID NO: 2580 |
| 377 | SEQ ID NO: 2576 | | SEQ ID NO: 2577 | | | SEQ ID NO: 2580 |
| 378 | SEQ ID NO: 2576 | | SEQ ID NO: 2577 | SEQ ID NO: 2578 | | SEQ ID NO: 2580 |

TABLE 17C

| | Light Chain HVR | | | Heavy Chain HVR | | |
|---|---|---|---|---|---|---|
| Antibody | L1 | L2 | L3 | H1 | H2 | H3 |
| 1 | SEQ ID NO: 2582 | | | | | |
| 2 | SEQ ID NO: 2582 | (I/V)KS | | | | |
| 3 | SEQ ID NO: 2582 | (I/V)KS | SEQ ID NO: 2583 | | | |
| 4 | | (I/V)KS | | | | |
| 5 | | (I/V)KS | SEQ ID NO: 2583 | | | |
| 6 | | | SEQ ID NO: 2583 | | | |
| 7 | SEQ ID NO: 2582 | | SEQ ID NO: 2583 | | | |
| 8 | SEQ ID NO: 2582 | | | SEQ ID NO: 2543 | | |
| 9 | SEQ ID NO: 2582 | | | SEQ ID NO: 2543 | SEQ ID NO: 2544 | |
| 10 | SEQ ID NO: 2582 | | | SEQ ID NO: 2543 | SEQ ID NO: 2544 | SEQ ID NO: 2545 |
| 11 | SEQ ID NO: 2582 | | | | SEQ ID NO: 2544 | |
| 12 | SEQ ID NO: 2582 | | | | SEQ ID NO: 2544 | SEQ ID NO: 2545 |
| 13 | SEQ ID NO: 2582 | | | | | SEQ ID NO: 2545 |
| 14 | SEQ ID NO: 2582 | | | SEQ ID NO: 2543 | | SEQ ID NO: 2545 |
| 15 | SEQ ID NO: 2582 | (I/V)KS | | SEQ ID NO: 2543 | | |
| 16 | SEQ ID NO: 2582 | (I/V)KS | | SEQ ID NO: 2543 | SEQ ID NO: 2544 | |
| 17 | SEQ ID NO: 2582 | (I/V)KS | | SEQ ID NO: 2543 | SEQ ID NO: 2544 | SEQ ID NO: 2545 |
| 18 | SEQ ID NO: 2582 | (I/V)KS | | | SEQ ID NO: 2544 | |
| 19 | SEQ ID NO: 2582 | (I/V)KS | | | SEQ ID NO: 2544 | SEQ ID NO: 2545 |
| 20 | SEQ ID NO: 2582 | (I/V)KS | | | | SEQ ID NO: 2545 |
| 21 | SEQ ID NO: 2582 | (I/V)KS | | SEQ ID NO: 2543 | | SEQ ID NO: 2545 |
| 22 | SEQ ID NO: 2582 | (I/V)KS | SEQ ID NO: 2583 | SEQ ID NO: 2543 | | |
| 23 | SEQ ID NO: 2582 | (I/V)KS | SEQ ID NO: 2583 | SEQ ID NO: 2543 | SEQ ID NO: 2544 | |
| 24 | SEQ ID NO: 2582 | (I/V)KS | SEQ ID NO: 2583 | SEQ ID NO: 2543 | SEQ ID NO: 2544 | SEQ ID NO: 2545 |
| 25 | SEQ ID NO: 2582 | (I/V)KS | SEQ ID NO: 2583 | | SEQ ID NO: 2544 | |
| 26 | SEQ ID NO: 2582 | (I/V)KS | SEQ ID NO: 2583 | | SEQ ID NO: 2544 | SEQ ID NO: 2545 |
| 27 | SEQ ID NO: 2582 | (I/V)KS | SEQ ID NO: 2583 | SEQ ID NO: 2543 | | SEQ ID NO: 2545 |
| 28 | SEQ ID NO: 2582 | (I/V)KS | SEQ ID NO: 2583 | | | SEQ ID NO: 2545 |
| 29 | | (I/V)KS | | SEQ ID NO: 2543 | | |
| 30 | | (I/V)KS | | SEQ ID NO: 2543 | SEQ ID NO: 2544 | |
| 31 | | (I/V)KS | | SEQ ID NO: 2543 | SEQ ID NO: 2544 | SEQ ID NO: 2545 |
| 32 | | (I/V)KS | | | SEQ ID NO: 2544 | |
| 33 | | (I/V)KS | | | SEQ ID NO: 2544 | SEQ ID NO: 2545 |
| 34 | | (I/V)KS | | | | SEQ ID NO: 2545 |
| 35 | | (I/V)KS | | SEQ ID NO: 2543 | | SEQ ID NO: 2545 |
| 36 | | (I/V)KS | SEQ ID NO: 2583 | SEQ ID NO: 2543 | | |
| 37 | | (I/V)KS | SEQ ID NO: 2583 | SEQ ID NO: 2543 | SEQ ID NO: 2544 | |
| 38 | | (I/V)KS | SEQ ID NO: 2583 | SEQ ID NO: 2543 | SEQ ID NO: 2544 | SEQ ID NO: 2545 |
| 39 | | (I/V)KS | SEQ ID NO: 2583 | | SEQ ID NO: 2544 | |
| 40 | | (I/V)KS | SEQ ID NO: 2583 | | SEQ ID NO: 2544 | SEQ ID NO: 2545 |
| 41 | | (I/V)KS | SEQ ID NO: 2583 | | | SEQ ID NO: 2545 |
| 42 | | (I/V)KS | SEQ ID NO: 2583 | SEQ ID NO: 2543 | | SEQ ID NO: 2545 |
| 43 | | | SEQ ID NO: 2583 | SEQ ID NO: 2543 | | |
| 44 | | | SEQ ID NO: 2583 | SEQ ID NO: 2543 | SEQ ID NO: 2544 | |
| 45 | | | SEQ ID NO: 2583 | SEQ ID NO: 2543 | SEQ ID NO: 2544 | SEQ ID NO: 2545 |
| 46 | | | SEQ ID NO: 2583 | | SEQ ID NO: 2544 | |
| 47 | | | SEQ ID NO: 2583 | | SEQ ID NO: 2544 | SEQ ID NO: 2545 |
| 48 | | | SEQ ID NO: 2583 | | | SEQ ID NO: 2545 |
| 49 | | | SEQ ID NO: 2583 | SEQ ID NO: 2543 | | SEQ ID NO: 2545 |
| 50 | SEQ ID NO: 2582 | | SEQ ID NO: 2583 | SEQ ID NO: 2543 | | |
| 51 | SEQ ID NO: 2582 | | SEQ ID NO: 2583 | SEQ ID NO: 2543 | SEQ ID NO: 2544 | |
| 52 | SEQ ID NO: 2582 | | SEQ ID NO: 2583 | SEQ ID NO: 2543 | SEQ ID NO: 2544 | SEQ ID NO: 2545 |
| 53 | SEQ ID NO: 2582 | | SEQ ID NO: 2583 | | SEQ ID NO: 2544 | |
| 54 | SEQ ID NO: 2582 | | SEQ ID NO: 2583 | | SEQ ID NO: 2544 | SEQ ID NO: 2545 |
| 55 | SEQ ID NO: 2582 | | SEQ ID NO: 2583 | | | SEQ ID NO: 2545 |
| 56 | SEQ ID NO: 2582 | | SEQ ID NO: 2583 | SEQ ID NO: 2543 | | SEQ ID NO: 2545 |
| 57 | SEQ ID NO: 2582 | | | SEQ ID NO: 2550 | | |
| 58 | SEQ ID NO: 2582 | | | SEQ ID NO: 2550 | SEQ ID NO: 2551 | |
| 59 | SEQ ID NO: 2582 | | | SEQ ID NO: 2550 | SEQ ID NO: 2551 | SEQ ID NO: 2552 |
| 60 | SEQ ID NO: 2582 | | | | SEQ ID NO: 2551 | |
| 61 | SEQ ID NO: 2582 | | | | SEQ ID NO: 2551 | SEQ ID NO: 2552 |
| 62 | SEQ ID NO: 2582 | | | | | SEQ ID NO: 2552 |
| 63 | SEQ ID NO: 2582 | | | SEQ ID NO: 2550 | | SEQ ID NO: 2552 |
| 64 | SEQ ID NO: 2582 | (I/V)KS | | SEQ ID NO: 2550 | | |
| 65 | SEQ ID NO: 2582 | (I/V)KS | | SEQ ID NO: 2550 | SEQ ID NO: 2551 | |
| 66 | SEQ ID NO: 2582 | (I/V)KS | | SEQ ID NO: 2550 | SEQ ID NO: 2551 | SEQ ID NO: 2552 |
| 67 | SEQ ID NO: 2582 | (I/V)KS | | | SEQ ID NO: 2551 | |
| 68 | SEQ ID NO: 2582 | (I/V)KS | | | SEQ ID NO: 2551 | SEQ ID NO: 2552 |
| 69 | SEQ ID NO: 2582 | (I/V)KS | | | | SEQ ID NO: 2552 |
| 70 | SEQ ID NO: 2582 | (I/V)KS | | SEQ ID NO: 2550 | | SEQ ID NO: 2552 |
| 71 | SEQ ID NO: 2582 | (I/V)KS | SEQ ID NO: 2583 | SEQ ID NO: 2550 | | |
| 72 | SEQ ID NO: 2582 | (I/V)KS | SEQ ID NO: 2583 | SEQ ID NO: 2550 | SEQ ID NO: 2551 | |
| 73 | SEQ ID NO: 2582 | (I/V)KS | SEQ ID NO: 2583 | SEQ ID NO: 2550 | SEQ ID NO: 2551 | SEQ ID NO: 2552 |
| 74 | SEQ ID NO: 2582 | (I/V)KS | SEQ ID NO: 2583 | | SEQ ID NO: 2551 | |
| 75 | SEQ ID NO: 2582 | (I/V)KS | SEQ ID NO: 2583 | | SEQ ID NO: 2551 | SEQ ID NO: 2552 |
| 76 | SEQ ID NO: 2582 | (I/V)KS | SEQ ID NO: 2583 | | | SEQ ID NO: 2552 |
| 77 | SEQ ID NO: 2582 | (I/V)KS | SEQ ID NO: 2583 | SEQ ID NO: 2550 | | SEQ ID NO: 2552 |
| 78 | | (I/V)KS | | SEQ ID NO: 2550 | | |
| 79 | | (I/V)KS | | SEQ ID NO: 2550 | SEQ ID NO: 2551 | |
| 80 | | (I/V)KS | | SEQ ID NO: 2550 | SEQ ID NO: 2551 | SEQ ID NO: 2552 |
| 81 | | (I/V)KS | | | SEQ ID NO: 2551 | |
| 82 | | (I/V)KS | | | SEQ ID NO: 2551 | SEQ ID NO: 2552 |
| 83 | | (I/V)KS | | | | SEQ ID NO: 2552 |
| 84 | | (I/V)KS | | SEQ ID NO: 2550 | | SEQ ID NO: 2552 |
| 85 | | (I/V)KS | SEQ ID NO: 2583 | SEQ ID NO: 2550 | | |
| 86 | | (I/V)KS | SEQ ID NO: 2583 | SEQ ID NO: 2550 | SEQ ID NO: 2551 | |
| 87 | | (I/V)KS | SEQ ID NO: 2583 | SEQ ID NO: 2550 | SEQ ID NO: 2551 | SEQ ID NO: 2552 |
| 88 | | (I/V)KS | SEQ ID NO: 2583 | | SEQ ID NO: 2551 | |
| 89 | | (I/V)KS | SEQ ID NO: 2583 | | SEQ ID NO: 2551 | SEQ ID NO: 2552 |
| 90 | | (I/V)KS | SEQ ID NO: 2583 | | | SEQ ID NO: 2552 |
| 91 | | (I/V)KS | SEQ ID NO: 2583 | SEQ ID NO: 2550 | | SEQ ID NO: 2552 |
| 92 | | | SEQ ID NO: 2583 | SEQ ID NO: 2550 | | |
| 93 | | | SEQ ID NO: 2583 | SEQ ID NO: 2550 | SEQ ID NO: 2551 | |
| 94 | | | SEQ ID NO: 2583 | SEQ ID NO: 2550 | SEQ ID NO: 2551 | SEQ ID NO: 2552 |
| 95 | | | SEQ ID NO: 2583 | | SEQ ID NO: 2551 | |
| 96 | | | SEQ ID NO: 2583 | | SEQ ID NO: 2551 | SEQ ID NO: 2552 |
| 97 | | | SEQ ID NO: 2583 | | | SEQ ID NO: 2552 |
| 98 | | | SEQ ID NO: 2583 | SEQ ID NO: 2550 | | SEQ ID NO: 2552 |
| 99 | SEQ ID NO: 2582 | | SEQ ID NO: 2583 | SEQ ID NO: 2550 | | |
| 100 | SEQ ID NO: 2582 | | SEQ ID NO: 2583 | SEQ ID NO: 2550 | SEQ ID NO: 2551 | |
| 101 | SEQ ID NO: 2582 | | SEQ ID NO: 2583 | SEQ ID NO: 2550 | SEQ ID NO: 2551 | SEQ ID NO: 2552 |
| 102 | SEQ ID NO: 2582 | | SEQ ID NO: 2583 | | SEQ ID NO: 2551 | |
| 103 | SEQ ID NO: 2582 | | SEQ ID NO: 2583 | | SEQ ID NO: 2551 | SEQ ID NO: 2552 |
| 104 | SEQ ID NO: 2582 | | SEQ ID NO: 2583 | | | SEQ ID NO: 2552 |
| 105 | SEQ ID NO: 2582 | | SEQ ID NO: 2583 | SEQ ID NO: 2550 | | SEQ ID NO: 2552 |
| 106 | SEQ ID NO: 2582 | | | SEQ ID NO: 2557 | | |
| 107 | SEQ ID NO: 2582 | | | SEQ ID NO: 2557 | SEQ ID NO: 2558 | |
| 108 | SEQ ID NO: 2582 | | | SEQ ID NO: 2557 | SEQ ID NO: 2558 | SEQ ID NO: 2559 |
| 109 | SEQ ID NO: 2582 | | | | SEQ ID NO: 2558 | |
| 110 | SEQ ID NO: 2582 | | | | SEQ ID NO: 2558 | SEQ ID NO: 2559 |
| 111 | SEQ ID NO: 2582 | | | | | SEQ ID NO: 2559 |
| 112 | SEQ ID NO: 2582 | | | SEQ ID NO: 2557 | | SEQ ID NO: 2559 |
| 113 | SEQ ID NO: 2582 | (I/V)KS | | SEQ ID NO: 2557 | | |
| 114 | SEQ ID NO: 2582 | (I/V)KS | | SEQ ID NO: 2557 | SEQ ID NO: 2558 | |
| 115 | SEQ ID NO: 2582 | (I/V)KS | | SEQ ID NO: 2557 | SEQ ID NO: 2558 | SEQ ID NO: 2559 |
| 116 | SEQ ID NO: 2582 | (I/V)KS | | | SEQ ID NO: 2558 | |
| 117 | SEQ ID NO: 2582 | (I/V)KS | | | SEQ ID NO: 2558 | SEQ ID NO: 2559 |
| 118 | SEQ ID NO: 2582 | (I/V)KS | | | | SEQ ID NO: 2559 |
| 119 | SEQ ID NO: 2582 | (I/V)KS | | SEQ ID NO: 2557 | | SEQ ID NO: 2559 |
| 120 | SEQ ID NO: 2582 | (I/V)KS | SEQ ID NO: 2583 | SEQ ID NO: 2557 | | |
| 121 | SEQ ID NO: 2582 | (I/V)KS | SEQ ID NO: 2583 | SEQ ID NO: 2557 | SEQ ID NO: 2558 | |
| 122 | SEQ ID NO: 2582 | (I/V)KS | SEQ ID NO: 2583 | SEQ ID NO: 2557 | SEQ ID NO: 2558 | SEQ ID NO: 2559 |
| 123 | SEQ ID NO: 2582 | (I/V)KS | SEQ ID NO: 2583 | | SEQ ID NO: 2558 | |
| 124 | SEQ ID NO: 2582 | (I/V)KS | SEQ ID NO: 2583 | | SEQ ID NO: 2558 | SEQ ID NO: 2559 |
| 125 | SEQ ID NO: 2582 | (I/V)KS | SEQ ID NO: 2583 | SEQ ID NO: 2557 | | SEQ ID NO: 2559 |
| 126 | SEQ ID NO: 2582 | (I/V)KS | SEQ ID NO: 2583 | | | SEQ ID NO: 2559 |
| 127 | | (I/V)KS | | SEQ ID NO: 2557 | | |
| 128 | | (I/V)KS | | SEQ ID NO: 2557 | SEQ ID NO: 2558 | |
| 129 | | (I/V)KS | | SEQ ID NO: 2557 | SEQ ID NO: 2558 | SEQ ID NO: 2559 |
| 130 | | (I/V)KS | | | SEQ ID NO: 2558 | |
| 131 | | (I/V)KS | | | SEQ ID NO: 2558 | SEQ ID NO: 2559 |
| 132 | | (I/V)KS | | | | SEQ ID NO: 2559 |
| 133 | | (I/V)KS | | SEQ ID NO: 2557 | | SEQ ID NO: 2559 |
| 134 | | (I/V)KS | SEQ ID NO: 2583 | SEQ ID NO: 2557 | | |
| 135 | | (I/V)KS | SEQ ID NO: 2583 | SEQ ID NO: 2557 | SEQ ID NO: 2558 | |
| 136 | | (I/V)KS | SEQ ID NO: 2583 | SEQ ID NO: 2557 | SEQ ID NO: 2558 | SEQ ID NO: 2559 |
| 137 | | (I/V)KS | SEQ ID NO: 2583 | | SEQ ID NO: 2558 | |
| 138 | | (I/V)KS | SEQ ID NO: 2583 | | SEQ ID NO: 2558 | SEQ ID NO: 2559 |
| 139 | | (I/V)KS | SEQ ID NO: 2583 | | | SEQ ID NO: 2559 |
| 140 | | (I/V)KS | SEQ ID NO: 2583 | SEQ ID NO: 2557 | | SEQ ID NO: 2559 |
| 141 | | | SEQ ID NO: 2583 | SEQ ID NO: 2557 | | |
| 142 | | | SEQ ID NO: 2583 | SEQ ID NO: 2557 | SEQ ID NO: 2558 | |
| 143 | | | SEQ ID NO: 2583 | SEQ ID NO: 2557 | SEQ ID NO: 2558 | SEQ ID NO: 2559 |
| 144 | | | SEQ ID NO: 2583 | | SEQ ID NO: 2558 | |
| 145 | | | SEQ ID NO: 2583 | | SEQ ID NO: 2558 | SEQ ID NO: 2559 |
| 146 | | | SEQ ID NO: 2583 | | | SEQ ID NO: 2559 |
| 147 | | | SEQ ID NO: 2583 | SEQ ID NO: 2557 | | SEQ ID NO: 2559 |
| 148 | SEQ ID NO: 2582 | | SEQ ID NO: 2583 | SEQ ID NO: 2557 | | |
| 149 | SEQ ID NO: 2582 | | SEQ ID NO: 2583 | SEQ ID NO: 2557 | SEQ ID NO: 2558 | |
| 150 | SEQ ID NO: 2582 | | SEQ ID NO: 2583 | SEQ ID NO: 2557 | SEQ ID NO: 2558 | SEQ ID NO: 2559 |
| 151 | SEQ ID NO: 2582 | | SEQ ID NO: 2583 | | SEQ ID NO: 2558 | |
| 152 | SEQ ID NO: 2582 | | SEQ ID NO: 2583 | | SEQ ID NO: 2558 | SEQ ID NO: 2559 |
| 153 | SEQ ID NO: 2582 | | SEQ ID NO: 2583 | | | SEQ ID NO: 2559 |
| 154 | SEQ ID NO: 2582 | | SEQ ID NO: 2583 | SEQ ID NO: 2557 | | SEQ ID NO: 2559 |
| 155 | SEQ ID NO: 2582 | | | SEQ ID NO: 2564 | | |
| 156 | SEQ ID NO: 2582 | | | SEQ ID NO: 2564 | SEQ ID NO: 2565 | |
| 157 | SEQ ID NO: 2582 | | | SEQ ID NO: 2564 | SEQ ID NO: 2565 | SEQ ID NO: 2566 |
| 158 | SEQ ID NO: 2582 | | | | SEQ ID NO: 2565 | |
| 159 | SEQ ID NO: 2582 | | | | SEQ ID NO: 2565 | SEQ ID NO: 2566 |
| 160 | SEQ ID NO: 2582 | | | | | SEQ ID NO: 2566 |
| 161 | SEQ ID NO: 2582 | | | SEQ ID NO: 2564 | | SEQ ID NO: 2566 |
| 162 | SEQ ID NO: 2582 | (I/V)KS | | SEQ ID NO: 2564 | | |
| 163 | SEQ ID NO: 2582 | (I/V)KS | | SEQ ID NO: 2564 | SEQ ID NO: 2565 | |
| 164 | SEQ ID NO: 2582 | (I/V)KS | | SEQ ID NO: 2564 | SEQ ID NO: 2565 | SEQ ID NO: 2566 |
| 165 | SEQ ID NO: 2582 | (I/V)KS | | | SEQ ID NO: 2565 | |
| 166 | SEQ ID NO: 2582 | (I/V)KS | | | SEQ ID NO: 2565 | SEQ ID NO: 2566 |
| 167 | SEQ ID NO: 2582 | (I/V)KS | | | | SEQ ID NO: 2566 |
| 168 | SEQ ID NO: 2582 | (I/V)KS | | SEQ ID NO: 2564 | | SEQ ID NO: 2566 |
| 169 | SEQ ID NO: 2582 | (I/V)KS | SEQ ID NO: 2583 | SEQ ID NO: 2564 | | |
| 170 | SEQ ID NO: 2582 | (I/V)KS | SEQ ID NO: 2583 | SEQ ID NO: 2564 | SEQ ID NO: 2565 | |
| 171 | SEQ ID NO: 2582 | (I/V)KS | SEQ ID NO: 2583 | SEQ ID NO: 2564 | SEQ ID NO: 2565 | SEQ ID NO: 2566 |
| 172 | SEQ ID NO: 2582 | (I/V)KS | SEQ ID NO: 2583 | | SEQ ID NO: 2565 | |
| 173 | SEQ ID NO: 2582 | (I/V)KS | SEQ ID NO: 2583 | | SEQ ID NO: 2565 | SEQ ID NO: 2566 |
| 174 | SEQ ID NO: 2582 | (I/V)KS | SEQ ID NO: 2583 | SEQ ID NO: 2564 | | SEQ ID NO: 2566 |
| 175 | SEQ ID NO: 2582 | (I/V)KS | SEQ ID NO: 2583 | | | SEQ ID NO: 2566 |
| 176 | | (I/V)KS | | SEQ ID NO: 2564 | | |
| 177 | | (I/V)KS | | SEQ ID NO: 2564 | SEQ ID NO: 2565 | |
| 178 | | (I/V)KS | | SEQ ID NO: 2564 | SEQ ID NO: 2565 | SEQ ID NO: 2566 |
| 179 | | (I/V)KS | | | SEQ ID NO: 2565 | |
| 180 | | (I/V)KS | | | SEQ ID NO: 2565 | SEQ ID NO: 2566 |
| 181 | | (I/V)KS | | | | SEQ ID NO: 2566 |
| 182 | | (I/V)KS | | SEQ ID NO: 2564 | | SEQ ID NO: 2566 |
| 183 | | (I/V)KS | SEQ ID NO: 2583 | SEQ ID NO: 2564 | | |
| 184 | | (I/V)KS | SEQ ID NO: 2583 | SEQ ID NO: 2564 | SEQ ID NO: 2565 | |
| 185 | | (I/V)KS | SEQ ID NO: 2583 | SEQ ID NO: 2564 | SEQ ID NO: 2565 | SEQ ID NO: 2566 |
| 186 | | (I/V)KS | SEQ ID NO: 2583 | | SEQ ID NO: 2565 | |
| 187 | | (I/V)KS | SEQ ID NO: 2583 | | SEQ ID NO: 2565 | SEQ ID NO: 2566 |
| 188 | | (I/V)KS | SEQ ID NO: 2583 | | | SEQ ID NO: 2566 |
| 189 | | (I/V)KS | SEQ ID NO: 2583 | SEQ ID NO: 2564 | | SEQ ID NO: 2566 |
| 190 | | | SEQ ID NO: 2583 | SEQ ID NO: 2564 | | |
| 191 | | | SEQ ID NO: 2583 | SEQ ID NO: 2564 | SEQ ID NO: 2565 | |
| 192 | | | SEQ ID NO: 2583 | SEQ ID NO: 2564 | SEQ ID NO: 2565 | SEQ ID NO: 2566 |
| 193 | | | SEQ ID NO: 2583 | | SEQ ID NO: 2565 | |
| 194 | | | SEQ ID NO: 2583 | | SEQ ID NO: 2565 | SEQ ID NO: 2566 |
| 195 | | | SEQ ID NO: 2583 | | | SEQ ID NO: 2566 |
| 196 | | | SEQ ID NO: 2583 | SEQ ID NO: 2564 | | SEQ ID NO: 2566 |
| 197 | SEQ ID NO: 2582 | | SEQ ID NO: 2583 | SEQ ID NO: 2564 | | |
| 198 | SEQ ID NO: 2582 | | SEQ ID NO: 2583 | SEQ ID NO: 2564 | SEQ ID NO: 2565 | |
| 199 | SEQ ID NO: 2582 | | SEQ ID NO: 2583 | SEQ ID NO: 2564 | SEQ ID NO: 2565 | SEQ ID NO: 2566 |
| 200 | SEQ ID NO: 2582 | | SEQ ID NO: 2583 | | SEQ ID NO: 2565 | |
| 201 | SEQ ID NO: 2582 | | SEQ ID NO: 2583 | | SEQ ID NO: 2565 | SEQ ID NO: 2566 |
| 202 | SEQ ID NO: 2582 | | SEQ ID NO: 2583 | | | SEQ ID NO: 2566 |
| 203 | SEQ ID NO: 2582 | | SEQ ID NO: 2583 | SEQ ID NO: 2564 | | SEQ ID NO: 2566 |
| 204 | SEQ ID NO: 2582 | | | SEQ ID NO: 2571 | | |
| 205 | SEQ ID NO: 2582 | | | SEQ ID NO: 2571 | SEQ ID NO: 2572 | |
| 206 | SEQ ID NO: 2582 | | | SEQ ID NO: 2571 | SEQ ID NO: 2572 | SEQ ID NO: 2573 |
| 207 | SEQ ID NO: 2582 | | | | SEQ ID NO: 2572 | |
| 208 | SEQ ID NO: 2582 | | | | SEQ ID NO: 2572 | SEQ ID NO: 2573 |
| 209 | SEQ ID NO: 2582 | | | | | SEQ ID NO: 2573 |
| 210 | SEQ ID NO: 2582 | | | SEQ ID NO: 2571 | | SEQ ID NO: 2573 |
| 211 | SEQ ID NO: 2582 | (I/V)KS | | SEQ ID NO: 2571 | | |
| 212 | SEQ ID NO: 2582 | (I/V)KS | | SEQ ID NO: 2571 | SEQ ID NO: 2572 | |
| 213 | SEQ ID NO: 2582 | (I/V)KS | | SEQ ID NO: 2571 | SEQ ID NO: 2572 | SEQ ID NO: 2573 |
| 214 | SEQ ID NO: 2582 | (I/V)KS | | | SEQ ID NO: 2572 | |
| 215 | SEQ ID NO: 2582 | (I/V)KS | | | SEQ ID NO: 2572 | SEQ ID NO: 2573 |
| 216 | SEQ ID NO: 2582 | (I/V)KS | | | | SEQ ID NO: 2573 |
| 217 | SEQ ID NO: 2582 | (I/V)KS | | SEQ ID NO: 2571 | | SEQ ID NO: 2573 |
| 218 | SEQ ID NO: 2582 | (I/V)KS | SEQ ID NO: 2583 | SEQ ID NO: 2571 | | |
| 219 | SEQ ID NO: 2582 | (I/V)KS | SEQ ID NO: 2583 | SEQ ID NO: 2571 | SEQ ID NO: 2572 | |
| 220 | SEQ ID NO: 2582 | (I/V)KS | SEQ ID NO: 2583 | SEQ ID NO: 2571 | SEQ ID NO: 2572 | SEQ ID NO: 2573 |
| 221 | SEQ ID NO: 2582 | (I/V)KS | SEQ ID NO: 2583 | | SEQ ID NO: 2572 | |
| 222 | SEQ ID NO: 2582 | (I/V)KS | SEQ ID NO: 2583 | | SEQ ID NO: 2572 | SEQ ID NO: 2573 |
| 223 | SEQ ID NO: 2582 | (I/V)KS | SEQ ID NO: 2583 | SEQ ID NO: 2571 | | SEQ ID NO: 2573 |
| 224 | SEQ ID NO: 2582 | (I/V)KS | SEQ ID NO: 2583 | | | SEQ ID NO: 2573 |
| 225 | | (I/V)KS | | SEQ ID NO: 2571 | | |
| 226 | | (I/V)KS | | SEQ ID NO: 2571 | SEQ ID NO: 2572 | |
| 227 | | (I/V)KS | | SEQ ID NO: 2571 | SEQ ID NO: 2572 | SEQ ID NO: 2573 |
| 228 | | (I/V)KS | | | SEQ ID NO: 2572 | |
| 229 | | (I/V)KS | | | SEQ ID NO: 2572 | SEQ ID NO: 2573 |
| 230 | | (I/V)KS | | | | SEQ ID NO: 2573 |
| 231 | | (I/V)KS | | SEQ ID NO: 2571 | | SEQ ID NO: 2573 |
| 232 | | (I/V)KS | SEQ ID NO: 2583 | SEQ ID NO: 2571 | | |
| 233 | | (I/V)KS | SEQ ID NO: 2583 | SEQ ID NO: 2571 | SEQ ID NO: 2572 | |
| 234 | | (I/V)KS | SEQ ID NO: 2583 | SEQ ID NO: 2571 | SEQ ID NO: 2572 | SEQ ID NO: 2573 |
| 235 | | (I/V)KS | SEQ ID NO: 2583 | | SEQ ID NO: 2572 | |
| 236 | | (I/V)KS | SEQ ID NO: 2583 | | SEQ ID NO: 2572 | SEQ ID NO: 2573 |
| 237 | | (I/V)KS | SEQ ID NO: 2583 | | | SEQ ID NO: 2573 |
| 238 | | (I/V)KS | SEQ ID NO: 2583 | SEQ ID NO: 2571 | | SEQ ID NO: 2573 |
| 239 | | | SEQ ID NO: 2583 | SEQ ID NO: 2571 | | |
| 240 | | | SEQ ID NO: 2583 | SEQ ID NO: 2571 | SEQ ID NO: 2572 | |
| 241 | | | SEQ ID NO: 2583 | SEQ ID NO: 2571 | SEQ ID NO: 2572 | SEQ ID NO: 2573 |
| 242 | | | SEQ ID NO: 2583 | | SEQ ID NO: 2572 | |
| 243 | | | SEQ ID NO: 2583 | | SEQ ID NO: 2572 | SEQ ID NO: 2573 |
| 244 | | | SEQ ID NO: 2583 | | | SEQ ID NO: 2573 |
| 245 | | | SEQ ID NO: 2583 | SEQ ID NO: 2571 | | SEQ ID NO: 2573 |
| 246 | SEQ ID NO: 2582 | | SEQ ID NO: 2583 | SEQ ID NO: 2571 | | |
| 247 | SEQ ID NO: 2582 | | SEQ ID NO: 2583 | SEQ ID NO: 2571 | SEQ ID NO: 2572 | |
| 248 | SEQ ID NO: 2582 | | SEQ ID NO: 2583 | SEQ ID NO: 2571 | SEQ ID NO: 2572 | SEQ ID NO: 2573 |
| 249 | SEQ ID NO: 2582 | | SEQ ID NO: 2583 | | SEQ ID NO: 2572 | |
| 250 | SEQ ID NO: 2582 | | SEQ ID NO: 2583 | | SEQ ID NO: 2572 | SEQ ID NO: 2573 |
| 251 | SEQ ID NO: 2582 | | SEQ ID NO: 2583 | | | SEQ ID NO: 2573 |
| 252 | SEQ ID NO: 2582 | | SEQ ID NO: 2583 | SEQ ID NO: 2571 | | SEQ ID NO: 2573 |

TABLE 17D

| SEQ | | |
|---|---|---|
| ID | | |
| NO | Comments | Sequence |
| 2539 | HJ23.4 light | DVVMTQTPLSLPVSLGDQAFISCRS |
| | chain variable | SQNLVHSNGNTYLHWYLQKPGQSPK |
| | region | LLIYIVSNRFSGVPDRFSGSGSGTD |
| | | FTLEISRVEAEDLGVYFCSQSTHVP |
| | | LTFGAGTKLELK |
| 2540 | HJ23.4 heavy | EVQLQQSGPDLVKPGASVKMSCKAS |
| | chain variable | GYTFTDYNIHWVKQSHGKTLEWIGY |
| | region | INPNTGGTYYNQKFKGKATMTVNKS |
| | | SSTAYMELRSLTSEDSAVYYCVATR |
| | | WDGVNWAQGTLVTVSA |
| 2541 | HJ23.4 L1 | QNLVHSNGNTY |
| | HJ23.4 L2 | IVS |
| 2542 | HJ23.4 L3 | SQSTHVPLT |
| 2543 | HJ23.4 H1 | GYTFTDYN |
| 2544 | HJ23.4 H2 | INPNTGGT |
| 2545 | HJ23.4 H3 | VATRWDGVN |
| 2546 | HJ23.7 light | DVVMTQTPLSLPVSLGDQASISCRS |
| | chain | SQSLVHSNGNTYLHWYLQKPGQSPK |
| | variable | LLIYKVSNRFSGVPDRFSGSGSGTD |
| | | FTLKISRVEAEDLGVYFCSQSTHVP |
| | | LTFGAGTKLELK |
| 2547 | HJ23.7 heavy | EVQLQQSGAELVKPGASVKLSCTSS |
| | chain | GFNIKGYYIHWVKQRTEQGLEWIGR |
| | variable | IDPEDGETKNAPKFQGKATFGTDTF |
| | | SNTAYLRLSSLTSEDTGVYYCVRTE |
| | | TRGAYWGPGTLVTVSA |
| 2548 | HJ23.7 L1 | QSLVHSNGNTY |
| | HJ23.7 L2 | KVS |
| 2549 | HJ23.7 L3 | SQSTHVPLT |
| 2550 | HJ23.7 H1 | GFNIKGYY |
| 2551 | HJ23.7 H2 | IDPEDGET |
| 2552 | HJ23.7 H3 | VRTETRGAY |
| 2553 | HJ23.8 light | DVVMTQTPLSLPVSLGDQASISCRS |
| | chain | SQSLVHSNGDTYLHWYLQKRGQSPK |
| | variable | LLIYKVSNRFSGVPDRFSGSGSGTD |
| | | FTLKISRVEAEDLGVYFCSQTTHVP |
| | | LTFGAGTKLELK |
| 2554 | HJ23.8 heavy | QVPLQQPGAEFVKPGASVKLSCKAS |
| | chain | AYTFTRYWMHWVKQRPGRGLEWIGR |
| | variable | IDPNSGGTNYNEKFKSKATFTVDKP |
| | | SSTSYMQLSSLTSEDSAVYFCVFTG |
| | | TLFDYWGQGTTLTVSS |
| 2555 | HJ23.8 L1 | QSLVHSNGDTY |
| | HJ23.8 L2 | KVS |
| 2556 | HJ23.8 L3 | SQTTHVPLT |
| 2557 | HJ23.8 H1 | AYTFTRYW |
| 2558 | HJ23.8 H2 | IDPNSGGT |
| 2559 | HJ23.8 H3 | VFTGTLFDY |
| 2560 | HJ23.9 light | DVVMTQTPLSLPVSLGDQASISCKS |
| | chain | SQSLVHSNGNTYLHWYLQKPGQSPK |
| | variable | LLIYKVSNRFSGVPDRFSGSGSGTD |
| | | FTLKISRVEAEDLGVYFCSQSTHVP |
| | | PTFGGGTKLEIK |
| 2561 | HJ23.9 heavy | EVQLQHSGPVLVKPGASVKMSCKSS |
| | chain | GYTFTDYYLNWVKQSHGKSPEWIGV |
| | variable | INPNTGSTSYNQKFKGKATLTVDKS |
| | | SSTAYMDLNSLTSEDSAVYYCATHY |
| | | YGSIYKQAWFAYWGQGTLVT |
| 2562 | HJ23.9 L1 | QSLVHSNGNTY |
| | HJ23.9 L2 | KVS |
| 2563 | HJ23.9 L3 | SQSTHVPPT |
| 2564 | HJ23.9 H1 | GYTFTDYY |
| 2565 | HJ23.9 H2 | INPNTGST |
| 2566 | HJ23.9 H3 | ATHYYGSIYKQAWFAY |
| 2567 | HJ23.10 light | DVVMTQTPLSLPVSLGDQASISCKS |
| | chain | SQSLVHSNGNTYLHWYLQKPGQSPK |
| | variable | LLIYKVSNRFSGVPDRFSGSGSGTD |
| | | FTLKISRVEAEDLGIYFCSQSTHVP |
| | | PTFGGGTKLEIK |
| 2568 | HJ23.10 heavy | EVQLQHSGPVLVKPGASVKMSCKAS |
| | chain variable | GYTFTDYYMNWVKQSHGKSPEWIGV |
| | region | INPNTGSTSYNQKFKGKATLTVDKS |
| | | SSTAYMDLNSLTSEDSAVYYCATHY |
| | | YGSIYKQAWFAYWGQGTLVTV |
| 2569 | HJ23.10 L1 | QSLVHSNGNTY |
| | HJ23.10 L2 | KVS |
| 2570 | HJ23.10 L3 | SQSTHVPPT |
| 2571 | HJ23.10 H1 | GYTFTDYY |
| 2572 | HJ23.10 H2 | INPNTGST |
| 2573 | HJ23.10 H3 | ATHYYGSIYKQAWFAY |
| 2574 | HJ23.13 light | DIVMSQSPSSLAVSVGEKVTMSCKS |
| | chain | SQSLLYSSNLKNYLAWFQQKPGQSP |
| | variable | KLLIYWASIRESGVPDRFTGSGSGT |
| | | DFTLTINSVKAEDLAVYYCQQYYTF |
| | | PLTFGAGTKLELK |
| 2575 | HJ23.13 heavy | EVQLVETGGGLVQPKGSLKLSCAAS |
| | chain variable | GFSFNINAMHWVRQAPGTGLKWVAR |
| | region | IRSGSNDFATYYADSVKDRFTISRD |
| | | DSHSMLYLQMNNLKTEDTAIYFCVR |
| | | EYVNYFVHWGQGTLVTVSA |
| 2576 | HJ23.13 L1 | QSLLYSSNLKNY |
| | HJ23.13 L2 | WAS |
| 2577 | HJ23.13 L3 | QQYYTFPLT |
| 2578 | HJ23.13 HI | GFSFNINA |
| 2579 | HJ23.13 H2 | IRSGSNDFAT |
| 2580 | HJ23.13 H3 | VREYVNYFVH |
| 2581 | | DHRDAGDLWFPGES |
| 2582 | Consensus L1 | QX1LVHSNGX2TY, |
| | | where X1 is S, |
| | | T, N, or Q |
| | | and |
| | | X2 is D or N |
| | Consensus L2 | X1VS, where |
| | | X1 is I or K |
| 2583 | Consensus L3 | SQX1THVPX2T, |
| | | where X1 is S, |
| | | T, N, or Q and |
| | | X2 is P or L |

[0487] In some embodiments, each of the light chain variable regions and each of the heavy chain variable regions disclosed above, including those in Table 17B (e.g., antibody 1-378) and Table 17C (antibody 1-252) may be attached to the light chain constant regions (Table 4) and heavy chain constant regions (Table 5) to form complete antibody light and heavy chains, respectively, as further discussed below. Further, each of the generated heavy and light chain sequences may be combined to form a complete antibody structure. It should be understood that the heavy chain and light chain variable regions provided herein can also be attached to other constant domains having different sequences than the exemplary sequences listed herein.

J. PCT Patent Application Publication No. WO2020/079580A1

[0488] In some embodiments, the TREM2 agonist is an antibody, or an antigen-binding fragment thereof, as described in PCT Patent Application Publication No. WO2020/079580A1 (“the '580 application”), which is incorporated by reference herein, in its entirety.

[0489] In some embodiments, the TREM2 binding agent comprises an antibody that comprises a light chain variable domain comprising a CDRL1, CDRL2, and CDRL3, and a heavy chain variable domain comprising a CDRH1, CDRH2, and CDRH3 disclosed in the '580 application specification. In some embodiments, the TREM2 binding agent comprises an antibody that comprises a light chain variable domain and a heavy chain variable domain disclosed in the '580 application specification.

[0490] In some embodiments, the antibody or antigen-binding fragment thereof comprises:
[0491] a) a heavy chain variable region CDR1 comprising SEQ ID NO: 2623 or SEQ ID NO: 2626 or SEQ ID NO: 2627 or SEQ ID NO: 2629; a heavy chain variable region CDR2 comprising SEQ ID NO: 2624 or SEQ ID NO: 2628, or SEQ ID NO: 2630; a heavy chain variable region CDR3 comprising SEQ ID NO: 2625 or SEQ ID NO: 2631; a light chain variable region CDR1 comprising SEQ ID NO: 2636 or SEQ ID NO: 2639 or SEQ ID NO: 2642; a light chain variable region CDR2 comprising SEQ ID NO: 2637 or SEQ ID NO: 2640; and a light chain variable region CDR3 comprising SEQ ID NO: 2638 or SEQ ID NO: 2641;
[0492] b) a heavy chain variable region CDR1 comprising SEQ ID NO: 2586 or SEQ ID NO: 2589 or SEQ ID NO: 2590 or SEQ ID NO: 2592; a heavy chain variable region CDR2 comprising SEQ ID NO: 2587 or SEQ ID NO: 2591 or SEQ ID NO: 2593; a heavy chain variable region CDR3 comprising SEQ ID NO: 2588 or SEQ ID NO: 2594; a light chain variable region CDR1 comprising SEQ ID NO: 2599 or SEQ ID NO: 2602 or SEQ ID NO: 2605; a light chain variable region CDR2 comprising SEQ ID NO: 2600 or SEQ ID NO: 2603; and a light chain variable region CDR3 comprising SEQ ID NO: 2601 or SEQ ID NO: 2604;
[0493] c) a heavy chain variable region CDR1 comprising SEQ ID NO: 2586 or SEQ ID NO: 2589 or SEQ ID NO: 2590 or SEQ ID NO: 2592; a heavy chain variable region CDR2 comprising SEQ ID NO: 2587 or SEQ ID NO: 2591 or SEQ ID NO: 2593; a heavy chain variable region CDR3 comprising SEQ ID NO: 2588 or SEQ ID NO: 2594; a light chain variable region CDR1 comprising SEQ ID NO: 2599 or SEQ ID NO: 2602 or SEQ ID NO: 2605; a light chain variable region CDR2 comprising SEQ ID NO: 2600 or SEQ ID NO: 2603; and a light chain variable region CDR3 comprising SEQ ID NO: 2660 or SEQ ID NO: 2661; or
[0494] d) a heavy chain variable region CDR1 comprising SEQ ID NO: 2666 or SEQ ID NO: 2669 or SEQ ID NO: 2670 or SEQ ID NO: 2672; a heavy chain variable region CDR2 comprising SEQ ID NO: 2667 or SEQ ID NO: 2671 or SEQ ID NO: 2673; a heavy chain variable region CDR3 comprising SEQ ID NO: 2668 or SEQ ID NO: 2674; a light chain variable region CDR1 comprising SEQ ID NO: 2679 or SEQ ID NO: 2682 or SEQ ID NO: 2685; a light chain variable region CDR2 comprising SEQ ID NO: 2680 or SEQ ID NO: 2683; and a light chain variable region CDR3 comprising SEQ ID NO: 2681 or SEQ ID NO: 2684.

[0495] In some embodiments, the antibody or antigen-binding fragment thereof comprises:
[0496] a) a VH polypeptide sequence having at least 95% sequence identity to SEQ ID NO: 2595 or to SEQ ID NO: 2632, and a VL polypeptide sequence having at least 95% sequence identity to SEQ ID NO: 2606 or to SEQ ID NO: 2643; or
[0497] b) a VH polypeptide sequence having at least 95% sequence identity to SEQ ID NO: 2595 or to SEQ ID NO: 2675, and a VL polypeptide sequence having at least 95% sequence identity to SEQ ID NO: 2662 or to SEQ ID NO: 2686.

[0498] In some embodiments, the antibody or antigen-binding fragment thereof comprises:
[0499] a) a heavy chain variable region CDR1 comprising SEQ ID NO: 2589; a heavy chain variable region CDR2 comprising SEQ ID NO: 2587; a heavy chain variable region CDR3 comprising SEQ ID NO: 2588; a light chain variable region CDR1 comprising SEQ ID NO: 2599; a light chain variable region CDR2 comprising SEQ ID NO: 2600; and a light chain variable region CDR3 comprising SEQ ID NO: 2601; b) a heavy chain variable region CDR1 comprising SEQ ID NO: 2626; a heavy chain variable region CDR2 comprising SEQ ID NO: 2624; a heavy chain variable region CDR3 comprising SEQ ID NO: 2625; a light chain variable region CDR1 comprising SEQ ID NO: 2636; a light chain variable region CDR2 comprising, e.g., consisting of SEQ ID NO: 2637; and a light chain variable region CDR3 comprising SEQ ID NO: 2638; c) a heavy chain variable region CDR1 comprising SEQ ID NO: 2589; a heavy chain variable region CDR2 comprising SEQ ID NO: 2587; a heavy chain variable region CDR3 comprising SEQ ID NO: 2588; a light chain variable region CDR1 comprising SEQ ID NO: 2599; a light chain variable region CDR2 comprising SEQ ID NO: 2600; and a light chain variable region CDR3 comprising SEQ ID NO: 2660; or d) a heavy chain variable region CDR1 comprising SEQ ID NO: 2669; a heavy chain variable region CDR2 comprising SEQ ID NO: 2667; a heavy chain variable region CDR3 comprising SEQ ID NO: 2668; a light chain variable region CDR1 comprising SEQ ID NO: 2679; a light chain variable region CDR2 comprising SEQ ID NO: 2680; and a light chain variable region CDR3 comprising SEQ ID NO: 2681.

[0500] In some embodiments, the antibody or antigen-binding fragment thereof comprises:
[0501] a) a heavy chain variable region CDR1 of SEQ ID NO: 2590; a heavy chain variable region CDR2 comprising SEQ ID NO: 2591; a heavy chain variable region CDR3 comprising SEQ ID NO: 2588; a light chain variable region CDR1 comprising SEQ ID NO: 2602; a light chain variable region CDR2 comprising SEQ ID NO: 2603; and a light chain variable region CDR3 comprising SEQ ID NO: 2604;
[0502] b) a heavy chain variable region CDR1 comprising SEQ ID NO: 2627; a heavy chain variable region CDR2 comprising SEQ ID NO: 2628; a heavy chain variable region CDR3 comprising SEQ ID NO: 2625; a light chain variable region CDR1 comprising SEQ ID NO: 2639; a light chain variable region CDR2 comprising SEQ ID NO: 2640; and a light chain variable region CDR3 comprising SEQ ID NO: 2641;
[0503] c) a heavy chain variable region CDR1 comprising SEQ ID NO: 2590; a heavy chain variable region CDR2 comprising SEQ ID NO: 2591; a heavy chain variable region CDR3 comprising SEQ ID NO: 2588; a light chain variable region CDR1 comprising SEQ ID NO: 2602; a light chain variable region CDR2 comprising SEQ ID NO: 2603; and a light chain variable region CDR3 comprising SEQ ID NO: 2661; or
[0504] d) a heavy chain variable region CDR1 comprising SEQ ID NO: 2670; a heavy chain variable region CDR2 comprising SEQ ID NO: 2671; a heavy chain variable region CDR3 comprising SEQ ID NO: 2668; a light chain variable region CDR1 comprising SEQ ID NO: 2682; a light chain variable region CDR2 comprising SEQ ID NO: 2683; and a light chain variable region CDR3 comprising SEQ ID NO: 2684.

[0505] In some embodiments, the antibody or antigen-binding fragment thereof comprises:
[0506] a) a heavy chain variable region CDR1 comprising SEQ ID NO: 2592; a heavy chain variable region CDR2 comprising SEQ ID NO: 2593; a heavy chain variable region CDR3 comprising SEQ ID NO: 2594; a light chain variable region CDR1 comprising SEQ ID NO: 2605; a light chain variable region CDR2 comprising SEQ ID NO: 2603; and a light chain variable region CDR3 comprising SEQ ID NO: 2601;
[0507] b) a heavy chain variable region CDR1 comprising SEQ ID NO: 2629; a heavy chain variable region CDR2 comprising SEQ ID NO: 2630; a heavy chain variable region CDR3 comprising SEQ ID NO: 2631; a light chain variable region CDR1 comprising SEQ ID NO: 2642; a light chain variable region CDR2 comprising SEQ ID NO: 2640; and a light chain variable region CDR3 comprising SEQ ID NO: 2638;
[0508] c) a heavy chain variable region CDR1 comprising SEQ ID NO: 2592; a heavy chain variable region CDR2 comprising SEQ ID NO: 2593; a heavy chain variable region CDR3 comprising SEQ ID NO: 2594; a light chain variable region CDR1 comprising SEQ ID NO: 2605; a light chain variable region CDR2 comprising SEQ ID NO: 2603; and a light chain variable region CDR3 comprising SEQ ID NO: 2660; or
[0509] d) a heavy chain variable region CDR1 comprising SEQ ID NO: 2672; a heavy chain variable region CDR2 comprising SEQ ID NO: 2673; a heavy chain variable region CDR3 comprising SEQ ID NO: 2674; a light chain variable region CDR1 comprising SEQ ID NO: 2685; a light chain variable region CDR2 comprising SEQ ID NO: 2683; and a light chain variable region CDR3 comprising SEQ ID NO: 2681.

[0510] In some embodiments, the antibody or antigen-binding fragment thereof comprises:
[0511] a) a heavy chain variable region CDR1 comprising SEQ ID NO: 2586; a heavy chain variable region CDR2 comprising SEQ ID NO: 2587; a heavy chain variable region CDR3 comprising SEQ ID NO: 2588; a light chain variable region CDR1 comprising SEQ ID NO: 2599; a light chain variable region CDR2 comprising SEQ ID NO: 2600; and a light chain variable region CDR3 comprising SEQ ID NO: 2601;
[0512] b) a heavy chain variable region CDR1 comprising SEQ ID NO: 2623; a heavy chain variable region CDR2 comprising SEQ ID NO: 2624; a heavy chain variable region CDR3 comprising SEQ ID NO: 2625; a light chain variable region CDR1 comprising SEQ ID NO: 2636; a light chain variable region CDR2 comprising SEQ ID NO: 2637; and a light chain variable region CDR3 comprising SEQ ID NO: 2638;
[0513] c) a heavy chain variable region CDR1 comprising SEQ ID NO: 2586; a heavy chain variable region CDR2 comprising SEQ ID NO: 2587; a heavy chain variable region CDR3 comprising SEQ ID NO: 2588; a light chain variable region CDR1 comprising SEQ ID NO: 2599; a light chain variable region CDR2 comprising SEQ ID NO: 2600; and a light chain variable region CDR3 comprising SEQ ID NO: 2660; or
[0514] d) a heavy chain variable region CDR1 comprising SEQ ID NO: 2666; a heavy chain variable region CDR2 comprising SEQ ID NO: 2667; a heavy chain variable region CDR3 comprising SEQ ID NO: 2668; a light chain variable region CDR1 comprising SEQ ID NO: 2679; a light chain variable region CDR2 comprising SEQ ID NO: 2680; and a light chain variable region CDR3 comprising SEQ ID NO: 2681.

[0515] In some embodiments, the antibody or antigen-binding fragment thereof comprises:
[0516] a) a VH comprising SEQ ID NO: 2595 and a VL comprising SEQ ID NO: 2606; or
[0517] b) a VH comprising SEQ ID NO: 2632 and a VL comprising SEQ ID NO: 2643; or
[0518] c) a VH comprising a sequence having at least 95% homology to SEQ ID NO: 2595 and a VL comprising a sequence having at least 95% homology to SEQ ID NO: 2606; or
[0519] d) a VH comprising a sequence having at least 95% homology to SEQ ID NO: 2632 and a VL comprising a sequence having at least 95% homology to SEQ ID NO: 2643; or
[0520] e) a VH comprising, e.g. consisting of, a sequence that differs by at least 1, 2, 3, 4, 5, or 6 amino acids from SEQ ID NO: 2595 and a VL comprising, e.g. consisting of, a sequence that differs by at least 1, 2, 3, 4, 5, or 6 amino acids from SEQ ID NO: 2606; or
[0521] f) a VH comprising, e.g. consisting of, a sequence that differs by at least 1, 2, 3, 4, 5, or 6 amino acids from SEQ ID NO: 2632 and a VL comprising, e.g. consisting of, a sequence that differs by at least 1, 2, 3, 4, 5, or 6 amino acids from SEQ ID NO: 2643. g) a VH comprising SEQ ID NO: 2595 and a VL comprising SEQ ID NO: 2662; or
[0522] h) a VH comprising SEQ ID NO: 2675 and a VL comprising SEQ ID NO: 2686; or
[0523] i) a VH comprising a sequence having at least 95% homology to SEQ ID NO: 2595 and a VL comprising a sequence having at least 95% homology to SEQ ID NO: 2662; or
[0524] j) a VH comprising a sequence having at least 95% homology to SEQ ID NO: 2675 and a VL comprising a sequence having at least 95% homology to SEQ ID NO: 2686; or
[0525] k) a VH comprising, e.g. consisting of, a sequence that differs by at least 1, 2, 3, 4, 5, or 6 amino acids from SEQ ID NO: 2595 and a VL comprising, e.g. consisting of, a sequence that differs by at least 1, 2, 3, 4, 5, or 6 amino acids from SEQ ID NO: 2662; or
[0526] l) a VH comprising, e.g. consisting of, a sequence that differs by at least 1, 2, 3, 4, 5, or 6 amino acids from SEQ ID NO: 2675 and a VL comprising, e.g. consisting of, a sequence that differs by at least 1, 2, 3, 4, 5, or 6 amino acids from SEQ ID NO: 2686.

[0527] In some embodiments, the antibody or antigen-binding fragment thereof comprises:
[0528] a) a heavy chain amino acid sequence comprising SEQ ID NO: 2597, SEQ ID NO: 2611, SEQ ID NO: 2615, SEQ ID NO: 2617, SEQ ID NO: 2619, or SEQ ID NO: 2621, and a light chain amino acid sequence comprising SEQ ID NO: 2608; b) a heavy chain amino acid sequence comprising SEQ ID NO: 2634, SEQ ID NO: 2648, SEQ ID NO: 2652, SEQ ID NO: 2654, SEQ ID NO: 2656, or SEQ ID NO: 2658, and a light chain amino acid sequence comprising SEQ ID NO: 2645; c) a heavy chain amino acid sequence having at least 95% sequence identity to SEQ ID NO: 2597, SEQ ID NO: 2611, SEQ ID NO: 2615, SEQ ID NO: 2617, SEQ ID NO: 2619, or SEQ ID NO: 2621, and a light chain amino acid sequence having at least 95% sequence identity to SEQ ID NO: 2608;
[0529] d) a heavy chain amino acid sequence having at least 95% sequence identity to SEQ ID NO: 2634, SEQ ID NO: 2648, SEQ ID NO: 2652, SEQ ID NO: 2654, SEQ ID NO: 2656, or SEQ ID NO: 2658, and a light chain amino acid sequence having at least 95% sequence identity to SEQ ID NO: 2645;
[0530] e) a heavy chain amino acid sequence comprising SEQ ID NO: 2597, and a light chain amino acid sequence comprising SEQ ID NO: 2664;
[0531] f) a heavy chain amino acid sequence comprising SEQ ID NO: 2677, and a light chain amino acid sequence comprising SEQ ID NO: 2688;
[0532] g) a heavy chain amino acid sequence having at least 95% sequence identity to SEQ ID NO: 2597, and a light chain amino acid sequence having at least 95% sequence identity to SEQ ID NO: 2664; or
[0533] h) a heavy chain amino acid sequence having at least 95% sequence identity to SEQ ID NO: 2677, and a light chain amino acid sequence having at least 95% sequence identity to SEQ ID NO: 2688.

[0534] In some embodiments, the antibody or antigen-binding fragment thereof comprises:
[0535] a) a heavy chain sequence comprising SEQ ID NO: 2597 and a light chain sequence comprising SEQ ID NO: 2608;
[0536] b) a heavy chain sequence comprising SEQ ID NO: 2611 and a light chain sequence comprising SEQ ID NO: 2608;
[0537] c) a heavy chain sequence comprising SEQ ID NO: 2615 and a light chain sequence comprising SEQ ID NO: 2608;
[0538] d) a heavy chain sequence comprising SEQ ID NO: 2617 and a light chain sequence comprising SEQ ID NO: 2608;
[0539] e) a heavy chain sequence comprising SEQ ID NO: 2619 and a light chain sequence comprising SEQ ID NO: 2608;
[0540] f) a heavy chain sequence comprising SEQ ID NO: 2621 and a light chain sequence comprising SEQ ID NO: 2608;
[0541] g) a heavy chain sequence comprising SEQ ID NO: 2634 and a light chain sequence comprising SEQ ID NO: 2645;
[0542] h) a heavy chain sequence comprising SEQ TD NO: 2648 and light chain sequence comprising SEQ TD NO: 2645;
[0543] i) a heavy chain sequence comprising SEQ TD NO: 2652 and light chain sequence comprising SEQ TD NO: 2645;
[0544] j) a heavy chain sequence comprising SEQ TD NO: 2654 and light chain sequence comprising SEQ TD NO: 2645;
[0545] k) a heavy chain sequence comprising SEQ TD NO: 2656 and light chain sequence comprising SEQ TD NO: 2645;
[0546] l) a heavy chain sequence comprising SEQ TD NO: 2658 and light chain sequence comprising SEQ TD NO: 2645;
[0547] m) a heavy chain sequence comprising SEQ ID NO: 2597 and light chain sequence comprising SEQ TD NO: 2664; or
[0548] n) a heavy chain sequence comprising SEQ TD NO: 2677 and light chain sequence comprising SEQ TD NO: 2688.

[0549] In some embodiments, the antibody is an antibody disclosed in Table 1 of PCT Patent Application Publication No. WO2020/079580A1, reproduced below as Table 18.

TABLE 18
Sequences of Exemplary Monoclonal Antibodies
That Bind Human TREM2
MOR44698A

| | | |
|---|---|---|
| SEQ ID NO: | HCDR1 | GYTFTGYHMS |
| 2586 | (Combined) | |
| SEQ ID NO: | HCDR2 | VINPVSGNTVYAQKFQG |
| 2587 | (Combined) | |
| SEQ ID NO: | HCDR3 | IPSYTYAFDY |
| 2588 | (Combined) | |
| SEQ ID NO: | HCDR1 (Kabat) | GYHMS |
| 2589 | | |
| SEQ ID NO: | HCDR2 (Kabat) | VINPVSGNTVYAQKFQG |
| 2587 | | |
| SEQ ID NO: | HCDR3 (Kabat) | IPSYTYAFDY |
| 2588 | | |
| SEQ ID NO: | HCDR1 | GYTFTGY |
| 2590 | (Chothia) | |
| SEQ ID NO: | HCDR2 | NPVSGN |
| 2591 | (Chothia) | |
| SEQ ID NO: | HCDR3 | IPSYTYAFDY |
| 2588 | (Chothia) | |
| SEQ ID NO: | HCDR1 (IMGT) | GYTFTGYH |
| 2592 | | |
| SEQ ID NO: | HCDR2 (IMGT) | INPVSGNT |
| 2593 | | |
| SEQ ID NO: | HCDR3 (IMGT) | ARIPSYTYAFDY |
| 2594 | | |
| SEQ ID NO: | VH | QVQLVQSGAEVKKPG |
| 2595 | | ASVKVSCKASGYTFT |
| | | GYHMSWVRQAPGQGL |
| | | EWMGVINPVSGNTVY |
| | | AQKFQGRVTMTRDTS |
| | | ISTAYMELSRLRSED |
| | | TAVYYCARIPSYTYA |
| | | FDYWGQGTLVTVSS |
| SEQ ID NO: | DNA VH | CAGGTGCAATTGGTG |
| 2596 | | CAGAGCGGTGCGGAA |
| | | GTGAAAAAACCGGGT |
| | | GCCAGCGTGAAAGTT |
| | | AGCTGCAAAGCGTCC |
| | | GGATATACCTTCACT |
| | | GGTTACCATATGTCT |
| | | TGGGTGCGCCAGGCC |
| | | CCGGGCCAGGGCCTC |
| | | GAGTGGATGGGCGTT |
| | | ATCAACCCGGTTTCT |
| | | GGCAACACGGTTTAC |
| | | GCGCAGAAATTTCAG |
| | | GGCCGGGTGACCATG |
| | | ACCCGTGATACCAGC |
| | | ATTAGCACCGCGTAT |
| | | ATGGAACTGAGCCGT |
| | | CTGCGTAGCGAAGAT |
| | | ACGGCCGTGTATTAT |
| | | TGCGCGCGTATCCCG |
| | | TCTTACACTTACGCT |
| | | TTCGATTACTGGGGC |
| | | CAAGGCACCCTGGTG |
| | | ACTGTTAGCTCA |
| SEQ ID NO: | Heavy Chain | QVQLVQSGAEVKKPG |
| 2597 | | ASVKVSCKASGYTFT |
| | | GYHMSWVRQAPGQGL |
| | | EWMGVINPVSGNTVY |
| | | AQKFQGRVTMTRDTS |
| | | ISTAYMELSRLRSED |
| | | TAVYYCARIPSYTYA |
| | | FDYWGQGTLVTVSSA |
| | | STKGPSVFPLAPSSK |
| | | STSGGTAALGCLVKD |
| | | YFPEPVTVSWNSGAL |
| | | TSGVHTFPAVLQSSG |
| | | LYSLSSVVTVPSSSL |
| | | GTQTYICNVNHKPSN |
| | | TKVDKRVEPKSCDKT |
| | | HTCPPCPAPEAAGGP |
| | | SVFLFPPKPKDTLMI |
| | | SRTPEVTCVVVDVSH |
| | | EDPEVKFNWYVDGVE |
| | | VHNAKTKPREEQYNS |
| | | TYRVVSVLTVLHQDW |
| | | LNGKEYKCKVSNKAL |
| | | PAPIEKTISKAKGQP |
| | | REPQVYTLPPSREEM |
| | | TKNQVSLTCLVKGFY |
| | | PSDIAVEWESNGQPE |
| | | NNYKTTPPVLDSDGS |
| | | FFLYSKLTVDKSRWQ |
| | | QGNVFSCSVMHEALH |
| | | NHYTQKSLSLSPGK |
| SEQ ID NO: | DNA Heavy | CAGGTGCAATTGGTG |
| 2598 | Chain | CAGAGCGGTGCGGAA |
| | | GTGAAAAAACCGGGT |
| | | GCCAGCGTGAAAGTT |
| | | AGCTGCAAAGCGTCC |
| | | GGATATACCTTCACT |
| | | GGTTACCATATGTCT |
| | | TGGGTGCGCCAGGCC |
| | | CCGGGCCAGGGCCTC |
| | | GAGTGGATGGGCGTT |
| | | ATCAACCCGGTTTCT |
| | | GGCAACACGGTTTAC |
| | | GCGCAGAAATTTCAG |
| | | GGCCGGGTGACCATG |
| | | ACCCGTGATACCAGC |
| | | ATTAGCACCGCGTAT |
| | | ATGGAACTGAGCCGT |
| | | CTGCGTAGCGAAGAT |
| | | ACGGCCGTGTATTAT |
| | | TGCGCGCGTATCCCG |
| | | TCTTACACTTACGCT |
| | | TTCGATTACTGGGGC |
| | | CAAGGCACCCTGGTG |
| | | ACTGTTAGCTCAGCC |
| | | TCCACCAAGGGTCCA |
| | | TCGGTCTTCCCCCTG |
| | | GCACCCTCCTCCAAG |
| | | AGCACCTCTGGGGGC |
| | | ACAGCGGCCCTGGGC |
| | | TGCCTGGTCAAGGAC |
| | | TACTTCCCCGAACCG |
| | | GTGACGGTGTCGTGG |
| | | AACTCAGGCGCCCTG |
| | | ACCAGCGGCGTGCAC |
| | | ACCTTCCCGGCTGTC |
| | | CTACAGTCCTCAGGA |
| | | CTCTACTCCCTCAGC |
| | | AGCGTGGTGACCGTG |
| | | CCCTCCAGCAGCTTG |
| | | GGCACCCAGACCTAC |
| | | ATCTGCAACGTGAAT |
| | | CACAAGCCCAGCAAC |
| | | ACCAAGGTGGACAAG |
| | | AGAGTTGAGCCCAAA |
| | | TCTTGTGACAAAACT |
| | | CACACATGCCCACCG |
| | | TGCCCAGCACCTGAA |
| | | GCAGCGGGGGGACCG |
| | | TCAGTCTTCCTCTTC |
| | | CCCCCAAAACCCAAG |
| | | GACACCCTCATGATC |
| | | TCCCGGACCCCTGAG |
| | | GTCACATGCGTGGTG |
| | | GTGGACGTGAGCCAC |
| | | GAAGACCCTGAGGTC |
| | | AAGTTCAACTGGTAC |
| | | GTGGACGGCGTGGAG |
| | | GTGCATAATGCCAAG |
| | | ACAAAGCCGCGGGAG |
| | | GAGCAGTACAACAGC |
| | | ACGTACCGGGTGGTC |
| | | AGCGTCCTCACCGTC |
| | | CTGCACCAGGACTGG |
| | | CTGAATGGCAAGGAG |
| | | TACAAGTGCAAGGTC |
| | | TCCAACAAAGCCCTC |
| | | CCAGCCCCCATCGAG |
| | | AAAACCATCTCCAAA |
| | | GCCAAAGGGCAGCCC |
| | | CGAGAACCACAGGTG |
| | | TACACCCTGCCCCCA |
| | | TCCCGGGAGGAGATG |
| | | ACCAAGAACCAGGTC |
| | | AGCCTGACCTGCCTG |
| | | GTCAAAGGCTTCTAT |
| | | CCCAGCGACATCGCC |
| | | GTGGAGTGGGAGAGC |
| | | AATGGGCAGCCGGAG |
| | | AACAACTACAAGACC |
| | | ACGCCTCCCGTGCTG |
| | | GACTCCGACGGCTCC |
| | | TTCTTCCTCTACAGC |
| | | AAGCTCACCGTGGAC |
| | | AAGAGCAGGTGGCAG |
| | | CAGGGGAACGTCTTC |
| | | TCATGCTCCGTGATG |
| | | CATGAGGCTCTGCAC |
| | | AACCACTACACGCAG |
| | | AAGAGCCTCTCCCTG |
| | | TCTCCGGGTAAA |
| SEQ ID NO: | LCDR1 | RASQDISNYLA |
| 2599 | (Combined) | |
| SEQ ID NO: | LCDR2 | RASSLQS |
| 2600 | (Combined) | |
| SEQ ID NO: | LCDR3 | FQYRHMPSQT |
| 2601 | (Combined) | |
| SEQ ID NO: | LCDR1 (Kabat) | RASQDISNYLA |
| 2599 | | |
| SEQ ID NO: | LCDR2 (Kabat) | RASSLQS |
| 2600 | | |
| SEQ ID NO: | LCDR3 (Kabat) | FQYRHMPSQT |
| 2601 | | |
| SEQ ID NO: | LCDR1 | SQDISNY |
| 2602 | (Chothia) | |
| SEQ ID NO: | LCDR2 | RAS |
| 2603 | (Chothia) | |
| SEQ ID NO: | LCDR3 | YRHMPSQ |
| 2604 | (Chothia) | |
| SEQ ID NO: | LCDR1 (IMGT) | QDISNY |
| 2605 | | |
| SEQ ID NO: | LCDR2 (IMGT) | RAS |
| 2603 | | |
| SEQ ID NO: | LCDR3 (IMGT) | FQYRHMPSQT |
| 2601 | | |
| SEQ ID NO: | VL | DIQMTQSPSSLSASV |
| 2606 | | GDRVTITCRASQDIS |
| | | NYLAWYQQKPGKAPK |
| | | LLIYRASSLQSGVPS |
| | | RFSGSGSGTDFTLTI |
| | | SSLQPEDFATYYCFQ |
| | | YRHMPSQTFGQGTKV |
| | | EIK |
| SEQ ID NO: | DNA VL | GATATCCAGATGACC |
| 2607 | | CAGAGCCCGAGCAGC |
| | | CTGAGCGCCAGCGTG |
| | | GGCGATCGCGTGACC |
| | | ATTACCTGCAGAGCC |
| | | AGCCAGGACATTTCT |
| | | AACTACCTGGCTTGG |
| | | TACCAGCAGAAACCG |
| | | GGCAAAGCGCCGAAA |
| | | CTATTAATCTACCGT |
| | | GCTTCTTCTCTGCAA |
| | | AGCGGCGTGCCGAGC |
| | | CGCTTTAGCGGCAGC |
| | | GGATCCGGCACCGAT |
| | | TTCACCCTGACCATT |
| | | AGCTCTCTGCAACCG |
| | | GAAGACTTTGCGACC |
| | | TATTATTGCTTCCAG |
| | | TACCGTCATATGCCG |
| | | TCTCAGACCTTTGGC |
| | | CAGGGCACGAAAGTT |
| | | GAAATTAAA |
| SEQ ID NO: | Light Chain | DIQMTQSPSSLSASV |
| 2608 | | GDRVTITCRASQDIS |
| | | NYLAWYQQKPGKAPK |
| | | LLIYRASSLQSGVPS |
| | | RFSGSGSGTDFTLTI |
| | | SSLQPEDFATYYCFQ |
| | | YRHMPSQTFGQGTKV |
| | | EIKRTVAAPSVFIFP |
| | | PSDEQLKSGTASVVC |
| | | LLNNFYPREAKVQWK |
| | | VDNALQSGNSQESVT |
| | | EQDSKDSTYSLSSTL |
| | | TLSKADYEKHKVYAC |
| | | EVTHQGLSSPVTKSF |
| | | NRGEC |
| SEQ ID NO: | DNA Light | GATATCCAGATGACC |
| 2609 | Chain | CAGAGCCCGAGCAGC |
| | | CTGAGCGCCAGCGTG |
| | | GGCGATCGCGTGACC |
| | | ATTACCTGCAGAGCC |
| | | AGCCAGGACATTTCT |
| | | AACTACCTGGCTTGG |
| | | TACCAGCAGAAACCG |
| | | GGCAAAGCGCCGAAA |
| | | CTATTAATCTACCGT |
| | | GCTTCTTCTCTGCAA |
| | | AGCGGCGTGCCGAGC |
| | | CGCTTTAGCGGCAGC |
| | | GGATCCGGCACCGAT |
| | | TTCACCCTGACCATT |
| | | AGCTCTCTGCAACCG |
| | | GAAGACTTTGCGACC |
| | | TATTATTGCTTCCAG |
| | | TACCGTCATATGCCG |
| | | TCTCAGACCTTTGGC |
| | | CAGGGCACGAAAGTT |
| | | GAAATTAAACGTACG |
| | | GTGGCCGCTCCCAGC |
| | | GTGTTCATCTTCCCC |
| | | CCCAGCGACGAGCAG |
| | | CTGAAGAGCGGCACC |
| | | GCCAGCGTGGTGTGC |
| | | CTGCTGAACAACTTC |
| | | TACCCCCGGGAGGCC |
| | | AAGGTGCAGTGGAAG |
| | | GTGGACAACGCCCTG |
| | | CAGAGCGGCAACAGC |
| | | CAGGAAAGCGTCACC |
| | | GAGCAGGACAGCAAG |
| | | GACTCCACCTACAGC |
| | | CTGAGCAGCACCCTG |
| | | ACCCTGAGCAAGGCC |
| | | GACTACGAGAAGCAC |
| | | AAGGTGTACGCCTGC |
| | | GAGGTGACCCACCAG |
| | | GGCCTGTCCAGCCCC |
| | | GTGACCAAGAGCTTC |
| | | AACCGGGGCGAGTGT |

MOR44698B

| | | |
|---|---|---|
| SEQ ID NO: | HCDR1 | GYTFTGYHMS |
| 2586 | (Combined) | |
| SEQ ID NO: | HCDR2 | VINPVSGNTVYAQKF |
| 2587 | (Combined) | QG |
| SEQ ID NO: | HCDR3 | IPSYTYAFDY |
| 2588 | (Combined) | |
| SEQ ID NO: | HCDR1 (Kabat) | GYHMS |
| 2589 | | |
| SEQ ID NO: | HCDR2 (Kabat) | VINPVSGNTVYAQKF |
| 2587 | | QG |
| SEQ ID NO: | HCDR3 (Kabat) | IPSYTYAFDY |
| 2588 | | |
| SEQ ID NO: | HCDR1 | GYTFTGY |
| 2590 | (Chothia) | |
| SEQ ID NO: | HCDR2 | NPVSGN |
| 2591 | (Chothia) | |
| SEQ ID NO: | HCDR3 | IPSYTYAFDY |
| 2588 | (Chothia) | |
| SEQ ID NO: | HCDR1 (IMGT) | GYTFTGYH |
| 2592 | | |
| SEQ ID NO: | HCDR2 (IMGT) | INPVSGNT |
| 2593 | | |
| SEQ ID NO: | HCDR3 (IMGT) | ARIPSYTYAFDY |
| 2594 | | |
| SEQ ID NO: | VH | QVQLVQSGAEVKKPG |
| 2595 | | ASVKVSCKASGYTFT |
| | | GYHMSWVRQAPGQGL |
| | | EWMGVINPVSGNTVY |
| | | AQKFQGRVTMTRDTS |
| | | ISTAYMELSRLRSED |
| | | TAVYYCARIPSYTYA |
| | | FDYWGQGTLVTVSS |
| SEQ ID NO: | DNA VH | CAAGTGCAACTCGTG |
| 2610 | | CAGTCAGGAGCCGAA |
| | | GTCAAGAAGCCTGGA |
| | | GCCTCGGTCAAGGTG |
| | | TCCTGCAAGGCCAGC |
| | | GGATACACTTTCACT |
| | | GGATACCACATGTCG |
| | | TGGGTCAGACAGGCT |
| | | CCTGGCCAAGGGCTG |
| | | GAGTGGATGGGCGTC |
| | | ATCAACCCGGTGTCG |
| | | GGTAATACCGTGTAC |
| | | GCCCAGAAGTTCCAG |
| | | GGTCGCGTGACCATG |
| | | ACCCGGGATACCTCC |
| | | ATTAGCACCGCGTAC |
| | | ATGGAGCTCAGCCGG |
| | | TTGAGATCCGAGGAT |
| | | ACCGCCGTGTACTAC |
| | | TGTGCGCGGATCCCG |
| | | TCCTACACTTACGCC |
| | | TTCGACTATTGGGGC |
| | | CAGGGGACTCTTGTC |
| | | ACCGTGTCCTCG |
| SEQ ID NO: | Heavy Chain | QVQLVQSGAEVKKPG |
| 2611 | | ASVKVSCKASGYTFT |
| | | GYHMSWVRQAPGQGL |
| | | EWMGVINPVSGNTVY |
| | | AQKFQGRVTMTRDTS |
| | | ISTAYMELSRLRSED |
| | | TAVYYCARIPSYTYA |
| | | FDYWGQGTLVTVSSA |
| | | STKGPSVFPLAPSSK |
| | | STSGGTAALGCLVKD |
| | | YFPEPVTVSWNSGAL |
| | | TSGVHTFPAVLQSSG |
| | | LYSLSSVVTVPSSSL |
| | | GTQTYICNVNHKPSN |
| | | TKVDKRVEPKSCDKT |
| | | HTCPPCPAPELLGGP |
| | | SVFLFPPKPKDTLMI |
| | | SRTPEVTCVVVDVSH |
| | | EDPEVKFNWYVDGVE |
| | | VHNAKTKPREEQYNS |
| | | TYRVVSVLTVLHQDW |
| | | LNGKEYKCKVSNKAL |
| | | PAPIEKTISKAKGQP |
| | | REPQVYTLPPSREEM |
| | | TKNQVSLTCLVKGFY |
| | | PSDIAVEWESNGQPE |
| | | NNYKTTPPVLDSDGS |
| | | FFLYSKLTVDKSRWQ |
| | | QGNVFSCSVMHEALH |
| | | NHYTQKSLSLSPGK |
| SEQ ID NO: | DNA Heavy | CAAGTGCAACTCGTG |
| 2612 | Chain | CAGTCAGGAGCCGAA |
| | | GTCAAGAAGCCTGGA |
| | | GCCTCGGTCAAGGTG |
| | | TCCTGCAAGGCCAGC |
| | | GGATACACTTTCACT |
| | | GGATACCACATGTCG |
| | | TGGGTCAGACAGGCT |
| | | CCTGGCCAAGGGCTG |
| | | GAGTGGATGGGCGTC |
| | | ATCAACCCGGTGTCG |
| | | GGTAATACCGTGTAC |
| | | GCCCAGAAGTTCCAG |
| | | GGTCGCGTGACCATG |
| | | ACCCGGGATACCTCC |
| | | ATTAGCACCGCGTAC |
| | | ATGGAGCTCAGCCGG |
| | | TTGAGATCCGAGGAT |
| | | ACCGCCGTGTACTAC |
| | | TGTGCGCGGATCCCG |
| | | TCCTACACTTACGCC |
| | | TTCGACTATTGGGGC |
| | | CAGGGGACTCTTGTC |
| | | ACCGTGTCCTCGGCC |
| | | TCCACTAAGGGCCCA |
| | | AGTGTGTTTCCCCTG |
| | | GCCCCCAGCAGCAAG |
| | | TCTACTTCCGGCGGA |
| | | ACTGCTGCCCTGGGT |
| | | TGCCTGGTGAAGGAC |
| | | TACTTCCCCGAGCCC |
| | | GTGACAGTGTCCTGG |
| | | AACTCTGGGGCTCTG |
| | | ACTTCCGGCGTGCAC |
| | | ACCTTCCCCGCCGTG |
| | | CTGCAGAGCAGCGGC |
| | | CTGTACAGCCTGAGC |
| | | AGCGTGGTGACAGTG |
| | | CCCTCCAGCTCTCTG |
| | | GGAACCCAGACCTAT |
| | | ATCTGCAACGTGAAC |
| | | CACAAGCCCAGCAAC |
| | | ACCAAGGTGGACAAG |
| | | AGAGTGGAGCCCAAG |
| | | AGCTGCGACAAGACC |
| | | CACACCTGCCCCCCC |
| | | TGCCCAGCTCCAGAA |
| | | CTGCTGGGAGGGCCT |
| | | TCCGTGTTCCTGTTC |
| | | CCCCCCAAGCCCAAG |
| | | GACACCCTGATGATC |
| | | AGCAGGACCCCCGAG |
| | | GTGACCTGCGTGGTG |
| | | GTGGACGTGTCCCAC |
| | | GAGGACCCAGAGGTG |
| | | AAGTTCAACTGGTAC |
| | | GTGGACGGCGTGGAG |
| | | GTGCACAACGCCAAG |
| | | ACCAAGCCCAGAGAG |
| | | GAGCAGTACAACAGC |
| | | ACCTACAGGGTGGTG |
| | | TCCGTGCTGACCGTG |
| | | CTGCACCAGGACTGG |
| | | CTGAACGGCAAAGAA |
| | | TACAAGTGCAAAGTC |
| | | TCCAACAAGGCCCTG |
| | | CCAGCCCCAATCGAA |
| | | AAGACAATCAGCAAG |
| | | GCCAAGGGCCAGCCA |
| | | CGGGAGCCCCAGGTG |
| | | TACACCCTGCCCCCC |
| | | AGCCGGGAGGAGATG |
| | | ACCAAGAACCAGGTG |
| | | TCCCTGACCTGTCTG |
| | | GTGAAGGGCTTCTAC |
| | | CCCAGCGATATCGCC |
| | | GTGGAGTGGGAGAGC |
| | | AACGGCCAGCCCGAG |
| | | AACAACTACAAGACC |
| | | ACCCCCCCAGTGCTG |
| | | GACAGCGACGGCAGC |
| | | TTCTTCCTGTACAGC |
| | | AAGCTGACCGTGGAC |
| | | AAGTCCAGGTGGCAG |
| | | CAGGGCAACGTGTTC |
| | | AGCTGCAGCGTGATG |
| | | CACGAGGCCCTGCAC |
| | | AACCACTACACCCAG |
| | | AAGTCCCTGAGCCTG |
| | | AGCCCCGGCAAG |
| SEQ ID NO: | LCDR1 | RASQDISNYLA |
| 2599 | (Combined) | |
| SEQ ID NO: | LCDR2 | RASSLQS |
| 2600 | (Combined) | |
| SEQ ID NO: | LCDR3 | FQYRHMPSQT |
| 2601 | (Combined) | |
| SEQ ID NO: | LCDR1 (Kabat) | RASQDISNYLA |
| 2599 | | |
| SEQ ID NO: | LCDR2 (Kabat) | RASSLQS |
| 2600 | | |
| SEQ ID NO: | LCDR3 (Kabat) | FQYRHMPSQT |
| 2601 | | |
| SEQ ID NO: | LCDR1 | SQDISNY |
| 2602 | (Chothia) | |
| SEQ ID NO: | LCDR2 | RAS |
| 2603 | (Chothia) | |
| SEQ ID NO: | LCDR3 | YRHMPSQ |
| 2604 | (Chothia) | |
| SEQ ID NO: | LCDR1 (IMGT) | QDISNY |
| 2605 | | |
| SEQ ID NO: | LCDR2 (IMGT) | RAS |
| 2603 | | |
| SEQ ID NO: | LCDR3 (IMGT) | FQYRHMPSQT |
| 2601 | | |
| SEQ ID NO: | VL | DIQMTQSPSSLSASV |
| 2606 | | GDRVTITCRASQDIS |
| | | NYLAWYQQKPGKAPK |
| | | LLIYRASSLQSGVPS |
| | | RFSGSGSGTDFTLTI |
| | | SSLQPEDFATYYCFQ |
| | | YRHMPSQTFGQGTKV |
| | | EIK |
| SEQ ID NO: | DNA VL | GACATTCAGATGACC |
| 2613 | | CAGTCCCCGTCGTCC |
| | | CTGTCCGCATCCGTG |
| | | GGCGACAGAGTCACC |
| | | ATCACTTGCCGGGCC |
| | | TCACAGGATATTTCC |
| | | AACTACCTGGCCTGG |
| | | TATCAGCAGAAGCCT |
| | | GGAAAGGCCCCGAAG |
| | | CTGCTGATCTACCGG |
| | | GCGTCCTCCTTGCAA |
| | | TCGGGAGTGCCAAGC |
| | | CGCTTTTCTGGTTCC |
| | | GGGAGCGGGACTGAC |
| | | TTCACCCTGACTATT |
| | | AGCAGCCTGCAGCCC |
| | | GAAGATTTCGCTACC |
| | | TACTACTGCTTCCAG |
| | | TACCGGCACATGCCC |
| | | TCACAAACCTTCGGA |
| | | CAGGGCACCAAAGTC |
| | | GAGATCAAG |
| SEQ ID NO: | Light Chain | DIQMTQSPSSLSASV |
| 2608 | | GDRVTITCRASQDIS |
| | | NYLAWYQQKPGKAPK |
| | | LLIYRASSLQSGVPS |
| | | RFSGSGSGTDFTLTI |
| | | SSLQPEDFATYYCFQ |
| | | YRHMPSQTFGQGTKV |
| | | EIKRTVAAPSVFIF |
| | | PPSDEQLKSGTASWC |
| | | LLNNFYPREAKVQWK |
| | | VDNALQSGNSQESVT |
| | | EQDSKDSTYSLSSTL |
| | | TLSKADYEKHKVYAC |
| | | EVTHQGLSSPVTKSF |
| | | NRGEC |
| SEQ ID NO: | DNA Light | GACATTCAGATGACC |
| 2614 | Chain | CAGTCCCCGTCGTCC |
| | | CTGTCCGCATCCGTG |
| | | GGCGACAGAGTCACC |
| | | ATCACTTGCCGGGCC |
| | | TCACAGGATATTTCC |
| | | AACTACCTGGCCTGG |
| | | TATCAGCAGAAGCCT |
| | | GGAAAGGCCCCGAAG |
| | | CTGCTGATCTACCGG |
| | | GCGTCCTCCTTGCAA |
| | | TCGGGAGTGCCAAGC |
| | | CGCTTTTCTGGTTCC |
| | | GGGAGCGGGACTGAC |
| | | TTCACCCTGACTATT |
| | | AGCAGCCTGCAGCCC |
| | | GAAGATTTCGCTACC |
| | | TACTACTGCTTCCAG |
| | | TACCGGCACATGCCC |
| | | TCACAAACCTTCGGA |
| | | CAGGGCACCAAAGTC |
| | | GAGATCAAGCGTACG |
| | | GTGGCCGCTCCCAGC |
| | | GTGTTCATCTTCCCC |
| | | CCCAGCGACGAGCAG |
| | | CTGAAGAGCGGCACC |
| | | GCCAGCGTGGTGTGC |
| | | CTGCTGAACAACTTC |
| | | TACCCCCGGGAGGCC |
| | | AAGGTGCAGTGGAAG |
| | | GTGGACAACGCCCTG |
| | | CAGAGCGGCAACAGC |
| | | CAGGAGAGCGTCACC |
| | | GAGCAGGACAGCAAG |
| | | GACTCCACCTACAGC |
| | | CTGAGCAGCACCCTG |
| | | ACCCTGAGCAAGGCC |
| | | GACTACGAGAAGCAT |
| | | AAGGTGTACGCCTGC |
| | | GAGGTGACCCACCAG |
| | | GGCCTGTCCAGCCCC |
| | | GTGACCAAGAGCTTC |
| | | AACAGGGGCGAGTGC |

MOR44698C

| | | |
|---|---|---|
| SEQ ID NO: | HCDR1 | GYTFTGYHMS |
| 2586 | (Combined) | |
| SEQ ID NO: | HCDR2 | VINPVSGNTVYAQKF |
| 2587 | (Combined) | QG |
| SEQ ID NO: | HCDR3 | IPSYTYAFDY |
| 2588 | (Combined) | |
| SEQ ID NO: | HCDR1 (Kabat) | GYHMS |
| 2589 | | |
| SEQ ID NO: | HCDR2 (Kabat) | VINPVSGNTVYAQKF |
| 2587 | | QG |
| SEQ ID NO: | HCDR3 (Kabat) | IPSYTYAFDY |
| 2588 | | |
| SEQ ID NO: | HCDR1 | GYTFTGY |
| 2590 | (Chothia) | |
| SEQ ID NO: | HCDR2 | NPVSGN |
| 2591 | (Chothia) | |
| SEQ ID NO: | HCDR3 | IPSYTYAFDY |
| 2588 | (Chothia) | |
| SEQ ID NO: | HCDR1 (IMGT) | GYTFTGYH |
| 2592 | | |
| SEQ ID NO: | HCDR2 (IMGT) | INPVSGNT |
| 2593 | | |
| SEQ ID NO: | HCDR3 (IMGT) | ARIPSYTYAFDY |
| 2594 | | |
| SEQ ID NO: | VH | QVQLVQSGAEVKKPG |
| 2595 | | ASVKVSCKASGYTFT |
| | | GYHMSWVRQAPGQGL |
| | | EWMGVINPVSGNTVY |
| | | AQKFQGRVTMTRDTS |
| | | ISTAYMELSRLRSED |
| | | TAVYYCARIPSYTYA |
| | | FDYWGQGTLVTVSS |
| SEQ ID NO: | DNA VH | CAAGTGCAACTCGTG |
| 2610 | | CAGTCAGGAGCCGAA |
| | | GTCAAGAAGCCTGGA |
| | | GCCTCGGTCAAGGTG |
| | | TCCTGCAAGGCCAGC |
| | | GGATACACTTTCACT |
| | | GGATACCACATGTCG |
| | | TGGGTCAGACAGGCT |
| | | CCTGGCCAAGGGCTG |
| | | GAGTGGATGGGCGTC |
| | | ATCAACCCGGTGTCG |
| | | GGTAATACCGTGTAC |
| | | GCCCAGAAGTTCCAG |
| | | GGTCGCGTGACCATG |
| | | ACCCGGGATACCTCC |
| | | ATTAGCACCGCGTAC |
| | | ATGGAGCTCAGCCGG |
| | | TTGAGATCCGAGGAT |
| | | ACCGCCGTGTACTAC |
| | | TGTGCGCGGATCCCG |
| | | TCCTACACTTACGCC |
| | | TTCGACTATTGGGGC |
| | | CAGGGGACTCTTGTC |
| | | ACCGTGTCCTCG |
| SEQ ID NO: | Heavy Chain | QVQLVQSGAEVKKPG |
| 2615 | | ASVKVSCKASGYTFT |
| | | GYHMSWVRQAPGQGL |
| | | EWMGVINPVSGNTVY |
| | | AQKFQGRVTMTRDTS |
| | | ISTAYMELSRLRSED |
| | | TAVYYCARIPSYTYA |
| | | FDYWGQGTLVTVSSA |
| | | STKGPSVFPLAPSSK |
| | | STSGGTAALGCLVKD |
| | | YFPEPVTVSWNSGAL |
| | | TSGVHTFPAVLQSSG |
| | | LYSLSSVVTVPSSSL |
| | | GTQTYICNVNHKPSN |
| | | TKVDKRVEPKSCDKT |
| | | HTCPPCPAPELLGGP |
| | | SVFLFPPKPKDTLMI |
| | | SRTPEVTCVVVAVSH |
| | | EDPEVKFNWYVDGVE |
| | | VHNAKTKPREEQYNS |
| | | TYRVVSVLTVLHQDW |
| | | LNGKEYKCKVSNKAL |
| | | AAPIEKTISKAKGQP |
| | | REPQVYTLPPSREEM |
| | | TKNQVSLTCLVKGFY |
| | | PSDIAVEWESNGQPE |
| | | NNYKTTPPVLDSDGS |
| | | FFLYSKLTVDKSRWQ |
| | | QGNVFSCSVMHEALH |
| | | NHYTQKSLSLSPGK |
| SEQ ID NO: | DNA Heavy | CAAGTGCAACTCGTG |
| 2616 | Chain | CAGTCAGGAGCCGAA |
| | | GTCAAGAAGCCTGGA |
| | | GCCTCGGTCAAGGTG |
| | | TCCTGCAAGGCCAGC |
| | | GGATACACTTTCACT |
| | | GGATACCACATGTCG |
| | | TGGGTCAGACAGGCT |
| | | CCTGGCCAAGGGCTG |
| | | GAGTGGATGGGCGTC |
| | | ATCAACCCGGTGTCG |
| | | GGTAATACCGTGTAC |
| | | GCCCAGAAGTTCCAG |
| | | GGTCGCGTGACCATG |
| | | ACCCGGGATACCTCC |
| | | ATTAGCACCGCGTAC |
| | | ATGGAGCTCAGCCGG |
| | | TTGAGATCCGAGGAT |
| | | ACCGCCGTGTACTAC |
| | | TGTGCGCGGATCCCG |
| | | TCCTACACTTACGCC |
| | | TTCGACTATTGGGGC |
| | | CAGGGGACTCTTGTC |
| | | ACCGTGTCCTCGGCC |
| | | TCCACTAAGGGCCCG |
| | | TCAGTGTTCCCCCTT |
| | | GCGCCATCCTCGAAG |
| | | TCAACCTCCGGAGGA |
| | | ACTGCCGCACTGGGT |
| | | TGCCTCGTGAAAGAC |
| | | TATTTCCCGGAACCC |
| | | GTCACTGTCTCCTGG |
| | | AACTCAGGAGCGCTC |
| | | ACCAGCGGAGTGCAT |
| | | ACCTTTCCTGCGGTG |
| | | CTGCAGTCCAGCGGC |
| | | CTGTACTCCCTGAGC |
| | | TCCGTCGTGACCGTC |
| | | CCCTCGTCGTCCCTG |
| | | GGAACCCAAACCTAC |
| | | ATTTGCAACGTCAAT |
| | | CACAAGCCAAGCAAC |
| | | ACTAAGGTGGACAAG |
| | | AGAGTGGAGCCCAAG |
| | | TCCTGCGATAAGACC |
| | | CACACCTGTCCTCCC |
| | | TGTCCGGCACCTGAA |
| | | CTGCTTGGTGGACCT |
| | | TCCGTGTTCCTGTTC |
| | | CCGCCCAAGCCAAAA |
| | | GACACCCTGATGATC |
| | | TCCCGCACTCCGGAA |
| | | GTCACTTGCGTGGTC |
| | | GTGGCCGTGTCCCAC |
| | | GAGGACCCCGAGGTC |
| | | AAGTTTAATTGGTAC |
| | | GTGGACGGAGTGGAA |
| | | GTGCACAACGCCAAG |
| | | ACCAAGCCGCGGGAA |
| | | GAACAGTACAACTCC |
| | | ACCTACCGCGTGGTG |
| | | TCCGTCCTGACTGTG |
| | | CTCCACCAGGACTGG |
| | | CTGAACGGAAAGGAG |
| | | TACAAGTGCAAAGTG |
| | | TCCAACAAGGCACTG |
| | | GCTGCCCCTATCGAA |
| | | AAGACTATCTCCAAG |
| | | GCCAAGGGCCAACCT |
| | | AGGGAGCCCCAGGTG |
| | | TACACGTTGCCTCCT |
| | | TCCCGCGAAGAAATG |
| | | ACTAAGAACCAGGTG |
| | | TCGCTGACCTGTCTC |
| | | GTGAAAGGGTTCTAC |
| | | CCCTCTGACATCGCC |
| | | GTGGAATGGGAGTCA |
| | | AACGGACAGCCTGAG |
| | | AACAACTATAAGACC |
| | | ACACCACCTGTCCTG |
| | | GACTCCGACGGCTCC |
| | | TTCTTCCTGTACTCA |
| | | AAGTTGACCGTGGAC |
| | | AAGTCGCGGTGGCAA |
| | | CAGGGCAACGTGTTC |
| | | TCTTGCTCCGTGATG |
| | | CACGAAGCCCTGCAC |
| | | AACCACTACACCCAA |
| | | AAGTCGCTCAGCCTC |
| | | TCCCCCGGAAAG |
| SEQ ID NO: | LCDR1 | RASQDISNYLA |
| 2599 | (Combined) | |
| SEQ ID NO: | LCDR2 | RASSLQS |
| 2600 | (Combined) | |
| SEQ ID NO: | LCDR3 | FQYRHMPSQT |
| 2601 | (Combined) | |
| SEQ ID NO: | LCDR1 (Kabat) | RASQDISNYLA |
| 2599 | | |
| SEQ ID NO: | LCDR2 (Kabat) | RASSLQS |
| 2600 | | |
| SEQ ID NO: | LCDR3 (Kabat) | FQYRHMPSQT |
| 2601 | | |
| SEQ ID NO: | LCDR1 | SQDISNY |
| 2602 | (Chothia) | |
| SEQ ID NO: | LCDR2 | RAS |
| 2603 | (Chothia) | |
| SEQ ID NO: | LCDR3 | YRHMPSQ |
| 2604 | (Chothia) | |
| SEQ ID NO: | LCDR1 (IMGT) | QDISNY |
| 2605 | | |
| SEQ ID NO: | LCDR2 (IMGT) | RAS |
| 2603 | | |
| SEQ ID NO: | LCDR3 (IMGT) | FQYRHMPSQT |
| 2601 | | |
| SEQ ID NO: | VL | DIQMTQSPSSLSASV |
| 2606 | | GDRVTITCRASQDIS |
| | | NYLAWYQQKPGKAPK |
| | | LLIYRASSLQSGVPS |
| | | RFSGSGSGTDFTLTI |
| | | SSLQPEDFATYYCFQ |
| | | YRHMPSQTFGQGTKV |
| | | EIK |
| SEQ ID NO: | DNA VL | GACATTCAGATGACC |
| 2613 | | CAGTCCCCGTCGTCC |
| | | CTGTCCGCATCCGTG |
| | | GGCGACAGAGTCACC |
| | | ATCACTTGCCGGGCC |
| | | TCACAGGATATTTCC |
| | | AACTACCTGGCCTGG |
| | | TATCAGCAGAAGCCT |
| | | GGAAAGGCCCCGAAG |
| | | CTGCTGATCTACCGG |
| | | GCGTCCTCCTTGCAA |
| | | TCGGGAGTGCCAAGC |
| | | CGCTTTTCTGGTTCC |
| | | GGGAGCGGGACTGAC |
| | | TTCACCCTGACTATT |
| | | AGCAGCCTGCAGCCC |
| | | GAAGATTTCGCTACC |
| | | TACTACTGCTTCCAG |
| | | TACCGGCACATGCCC |
| | | TCACAAACCTTCGGA |
| | | CAGGGCACCAAAGTC |
| | | GAGATCAAG |
| SEQ ID NO: | Light Chain | DIQMTQSPSSLSASV |
| 2608 | | GDRVTITCRASQDIS |
| | | NYLAWYQQKPGKAPK |
| | | LLIYRASSLQSGVPS |
| | | RFSGSGSGTDFTLTI |
| | | SSLQPEDFATYYCFQ |
| | | YRHMPSQTFGQGTKV |
| | | EIKRTVAAPSVFIFP |
| | | PSDEQLKSGTASWCL |
| | | LNNFYPREAKVQWKV |
| | | DNALQSGNSQESVTE |
| | | QDSKDSTYSLSSTLT |
| | | LSKADYEKHKVYACE |
| | | VTHQGLSSPVTKSFN |
| | | RGEC |
| SEQ ID NO: | DNA Light | GACATTCAGATGACC |
| 2614 | Chain | CAGTCCCCGTCGTCC |
| | | CTGTCCGCATCCGTG |
| | | GGCGACAGAGTCACC |
| | | ATCACTTGCCGGGCC |
| | | TCACAGGATATTTCC |
| | | AACTACCTGGCCTGG |
| | | TATCAGCAGAAGCCT |
| | | GGAAAGGCCCCGAAG |
| | | CTGCTGATCTACCGG |
| | | GCGTCCTCCTTGCAA |
| | | TCGGGAGTGCCAAGC |
| | | CGCTTTTCTGGTTCC |
| | | GGGAGCGGGACTGAC |
| | | TTCACCCTGACTATT |
| | | AGCAGCCTGCAGCCC |
| | | GAAGATTTCGCTACC |
| | | TACTACTGCTTCCAG |
| | | TACCGGCACATGCCC |
| | | TCACAAACCTTCGGA |
| | | CAGGGCACCAAAGTC |
| | | GAGATCAAGCGTACG |
| | | GTGGCCGCTCCCAGC |
| | | GTGTTCATCTTCCCC |
| | | CCCAGCGACGAGCAG |
| | | CTGAAGAGCGGCACC |
| | | GCCAGCGTGGTGTGC |
| | | CTGCTGAACAACTTC |
| | | TACCCCCGGGAGGCC |
| | | AAGGTGCAGTGGAAG |
| | | GTGGACAACGCCCTG |
| | | CAGAGCGGCAACAGC |
| | | CAGGAGAGCGTCACC |
| | | GAGCAGGACAGCAAG |
| | | GACTCCACCTACAGC |
| | | CTGAGCAGCACCCTG |
| | | ACCCTGAGCAAGGCC |
| | | GACTACGAGAAGCAT |
| | | AAGGTGTACGCCTGC |
| | | GAGGTGACCCACCAG |
| | | GGCCTGTCCAGCCCC |
| | | GTGACCAAGAGCTTC |
| | | AACAGGGGCGAGTGC |

MOR44698D

| | | |
|---|---|---|
| SEQ ID NO: | HCDR1 | GYTFTGYHMS |
| 2586 | (Combined) | |
| SEQ ID NO: | HCDR2 | VINPVSGNTVYAQKF |
| 2587 | (Combined) | QG |
| SEQ ID NO: | HCDR3 | IPSYTYAFDY |
| 2588 | (Combined) | |
| SEQ ID NO: | HCDR1 (Kabat) | GYHMS |

2589

| | | |
|---|---|---|
| SEQ ID NO: | HCDR2 (Kabat) | VINPVSGNTVYAQKF |
| 2587 | | QG |
| SEQ ID NO: | HCDR3 (Kabat) | IPSYTYAFDY |
| 2588 | | |
| SEQ ID NO: | HCDR1 | GYTFTGY |
| 2590 | (Chothia) | |
| SEQ ID NO: | HCDR2 | NPVSGN |
| 2591 | (Chothia) | |
| SEQ ID NO: | HCDR3 | IPSYTYAFDY |
| 2588 | (Chothia) | |
| SEQ ID NO: | HCDR1 (IMGT) | GYTFTGYH |
| 2592 | | |
| SEQ ID NO: | HCDR2 (IMGT) | INPVSGNT |
| 2593 | | |
| SEQ ID NO: | HCDR3 (IMGT) | ARIPSYTYAFDY |
| 2594 | | |
| SEQ ID NO: | VH | QVQLVQSGAEVKKPG |
| 2595 | | ASVKVSCKASGYTFT |
| | | GYHMSWVRQAPGQGL |
| | | EWMGVINPVSGNTVY |
| | | AQKFQGRVTMTRDTS |
| | | ISTAYMELSRLRSED |
| | | TAVYYCARIPSYTYA |
| | | FDYWGQGTLVTVSS |
| SEQ ID NO: | DNA VH | CAAGTGCAACTCGTG |
| 2610 | | CAGTCAGGAGCCGAA |
| | | GTCAAGAAGCCTGGA |
| | | GCCTCGGTCAAGGTG |
| | | TCCTGCAAGGCCAGC |
| | | GGATACACTTTCACT |
| | | GGATACCACATGTCG |
| | | TGGGTCAGACAGGCT |
| | | CCTGGCCAAGGGCTG |
| | | GAGTGGATGGGCGTC |
| | | ATCAACCCGGTGTCG |
| | | GGTAATACCGTGTAC |
| | | GCCCAGAAGTTCCAG |
| | | GGTCGCGTGACCATG |
| | | ACCCGGGATACCTCC |
| | | ATTAGCACCGCGTAC |
| | | ATGGAGCTCAGCCGG |
| | | TTGAGATCCGAGGAT |
| | | ACCGCCGTGTACTAC |
| | | TGTGCGCGGATCCCG |
| | | TCCTACACTTACGCC |
| | | TTCGACTATTGGGGC |
| | | CAGGGGACTCTTGTC |
| | | ACCGTGTCCTCG |
| SEQ ID NO: | Heavy Chain | QVQLVQSGAEVKKPG |
| 2617 | | ASVKVSCKASGYTFT |
| | | GYHMSWVRQAPGQGL |
| | | EWMGVINPVSGNTVY |
| | | AQKFQGRVTMTRDTS |
| | | ISTAYMELSRLRSED |
| | | TAVYYCARIPSYTYA |
| | | FDYWGQGTLVTVSSA |
| | | STKGPSVFPLAPSSK |
| | | STSGGTAALGCLVKD |
| | | YFPEPVTVSWNSGAL |
| | | TSGVHTFPAVLQSSG |
| | | LYSLSSVVTVPSSSL |
| | | GTQTYICNVNHKPSN |
| | | TKVDKRVEPKSCDKT |
| | | HTCPPCPAPELLGGP |
| | | SVFLFPPKPKDTLMI |
| | | SRTPEVTCVVVDVSH |
| | | EDPEVKFNWYVDGVE |
| | | VHNAKTKPREEQYNS |
| | | TYRVVSVLTVLHQDW |
| | | LNGKEYKCKVSNKAL |
| | | PAPIEKTISKAKGQP |
| | | REPQVYTLPPSREEM |
| | | TKNQVSLTCLVKGFY |
| | | PSDIAVEWESNGQPE |
| | | NNYKTTPPVLDSDGS |
| | | FFLYSKLTVDKSRWQ |
| | | QGNVFSCSVLHEALH |
| | | SHYTQKSLSLSPGK |
| SEQ ID NO: | DNA Heavy | CAAGTGCAACTCGTG |
| 2618 | Chain | CAGTCAGGAGCCGAA |
| | | GTCAAGAAGCCTGGA |
| | | GCCTCGGTCAAGGTG |
| | | TCCTGCAAGGCCAGC |
| | | GGATACACTTTCACT |
| | | GGATACCACATGTCG |
| | | TGGGTCAGACAGGCT |
| | | CCTGGCCAAGGGCTG |
| | | GAGTGGATGGGCGTC |
| | | ATCAACCCGGTGTCG |
| | | GGTAATACCGTGTAC |
| | | GCCCAGAAGTTCCAG |
| | | GGTCGCGTGACCATG |
| | | ACCCGGGATACCTCC |
| | | ATTAGCACCGCGTAC |
| | | ATGGAGCTCAGCCGG |
| | | TTGAGATCCGAGGAT |
| | | ACCGCCGTGTACTAC |
| | | TGTGCGCGGATCCCG |
| | | TCCTACACTTACGCC |
| | | TTCGACTATTGGGGC |
| | | CAGGGGACTCTTGTC |
| | | ACCGTGTCCTCGGCC |
| | | TCCACTAAGGGCCCG |
| | | TCAGTGTTCCCCCTT |
| | | GCGCCATCCTCGAAG |
| | | TCAACCTCCGGAGGA |
| | | ACTGCCGCACTGGGT |
| | | TGCCTCGTGAAAGAC |
| | | TATTTCCCGGAACCC |
| | | GTCACTGTCTCCTGG |
| | | AACTCAGGAGCGCTC |
| | | ACCAGCGGAGTGCAT |
| | | ACCTTTCCTGCGGTG |
| | | CTGCAGTCCAGCGGC |
| | | CTGTACTCCCTGAGC |
| | | TCCGTCGTGACCGTC |
| | | CCCTCGTCGTCCCTG |
| | | GGAACCCAAACCTAC |
| | | ATTTGCAACGTCAAT |
| | | CACAAGCCAAGCAAC |
| | | ACTAAGGTGGACAAG |
| | | AGAGTGGAGCCCAAG |
| | | TCCTGCGATAAGACC |
| | | CACACCTGTCCTCCC |
| | | TGTCCGGCACCTGAA |
| | | CTGCTTGGTGGACCT |
| | | TCCGTGTTCCTGTTC |
| | | CCGCCCAAGCCAAAA |
| | | GACACCCTGATGATC |
| | | TCCCGCACTCCGGAA |
| | | GTCACTTGCGTGGTC |
| | | GTGGACGTGTCCCAC |
| | | GAGGACCCCGAGGTC |
| | | AAGTTTAATTGGTAC |
| | | GTGGACGGAGTGGAA |
| | | GTGCACAACGCCAAG |
| | | ACCAAGCCGCGGGAA |
| | | GAACAGTACAACTCC |
| | | ACCTACCGCGTGGTG |
| | | TCCGTCCTGACTGTG |
| | | CTCCACCAGGACTGG |
| | | CTGAACGGAAAGGAG |
| | | TACAAGTGCAAAGTG |
| | | TCCAACAAGGCACTG |
| | | CCAGCCCCTATCGAA |
| | | AAGACTATCTCCAAG |
| | | GCCAAGGGCCAACCT |
| | | AGGGAGCCCCAGGTG |
| | | TACACGTTGCCTCCT |
| | | TCCCGCGAAGAAATG |
| | | ACTAAGAACCAGGTG |
| | | TCGCTGACCTGTCTC |
| | | GTGAAAGGGTTCTAC |
| | | CCCTCTGACATCGCC |
| | | GTGGAATGGGAGTCA |
| | | AACGGACAGCCTGAG |
| | | AACAACTATAAGACC |
| | | ACACCACCTGTCCTG |
| | | GACTCCGACGGCTCC |
| | | TTCTTCCTGTACTCA |
| | | AAGTTGACCGTGGAC |
| | | AAGTCGCGGTGGCAA |
| | | CAGGGCAACGTGTTC |
| | | TCTTGCTCCGTGCTG |
| | | CACGAAGCCCTGCAC |
| | | AGCCACTACACCCAA |
| | | AAGTCGCTCAGCCTC |
| | | TCCCCCGGAAAG |
| SEQ ID NO: | LCDR1 | RASQDISNYLA |
| 2599 | (Combined) | |
| SEQ ID NO: | LCDR2 | RASSLQS |
| 2600 | (Combined) | |
| SEQ ID NO: | LCDR3 | FQYRHMPSQT |
| 2601 | (Combined) | |
| SEQ ID NO: | LCDR1 (Kabat) | RASQDISNYLA |
| 2599 | | |
| SEQ ID NO: | LCDR2 (Kabat) | RASSLQS |
| 2600 | | |
| SEQ ID NO: | LCDR3 (Kabat) | FQYRHMPSQT |
| 2601 | | |
| SEQ ID NO: | LCDR1 | SQDISNY |
| 2602 | (Chothia) | |
| SEQ ID NO: | LCDR2 | RAS |
| 2603 | (Chothia) | |
| SEQ ID NO: | LCDR3 | YRHMPSQ |
| 2604 | (Chothia) | |
| SEQ ID NO: | LCDR1 (IMGT) | QDISNY |
| 2605 | | |
| SEQ ID NO: | LCDR2 (IMGT) | RAS |
| 2603 | | |
| SEQ ID NO: | LCDR3 (IMGT) | FQYRHMPSQT |
| 2601 | | |
| SEQ ID NO: | VL | DIQMTQSPSSLSASV |
| 2606 | | GDRVTITCRASQDIS |
| | | NYLAWYQQKPGKAPK |
| | | LLIYRASSLQSGVPS |
| | | RFSGSGSGTDFTLTI |
| | | SSLQPEDFATYYCFQ |
| | | YRHMPSQTFGQGTKV |
| | | EIK |
| SEQ ID NO: | DNA VL | GACATTCAGATGACC |
| 2613 | | CAGTCCCCGTCGTCC |
| | | CTGTCCGCATCCGTG |
| | | GGCGACAGAGTCACC |
| | | ATCACTTGCCGGGCC |
| | | TCACAGGATATTTCC |
| | | AACTACCTGGCCTGG |
| | | TATCAGCAGAAGCCT |
| | | GGAAAGGCCCCGAAG |
| | | CTGCTGATCTACCGG |
| | | GCGTCCTCCTTGCAA |
| | | TCGGGAGTGCCAAGC |
| | | CGCTTTTCTGGTTCC |
| | | GGGAGCGGGACTGAC |
| | | TTCACCCTGACTATT |
| | | AGCAGCCTGCAGCCC |
| | | GAAGATTTCGCTACC |
| | | TACTACTGCTTCCAG |
| | | TACCGGCACATGCCC |
| | | TCACAAACCTTCGGA |
| | | CAGGGCACCAAAGTC |
| | | GAGATCAAG |
| SEQ ID NO: | Light Chain | DIQMTQSPSSLSASV |
| 2608 | | GDRVTITCRASQDIS |
| | | NYLAWYQQKPGKAPK |
| | | LLIYRASSLQSGVPS |
| | | RFSGSGSGTDFTLTI |
| | | SSLQPEDFATYYCFQ |
| | | YRHMPSQTFGQGTKV |
| | | EIKRTVAAPSVFIFP |
| | | PSDEQLKSGTASWCL |
| | | LNNFYPREAKVQWKV |
| | | DNALQSGNSQESVTE |
| | | QDSKDSTYSLSSTLT |
| | | LSKADYEKHKVYACE |
| | | VTHQGLSSPVTKSFN |
| | | RGEC |
| SEQ ID NO: | DNA Light | GACATTCAGATGACC |
| 2614 | Chain | CAGTCCCCGTCGTCC |
| | | CTGTCCGCATCCGTG |
| | | GGCGACAGAGTCACC |
| | | ATCACTTGCCGGGCC |
| | | TCACAGGATATTTCC |
| | | AACTACCTGGCCTGG |
| | | TATCAGCAGAAGCCT |
| | | GGAAAGGCCCCGAAG |
| | | CTGCTGATCTACCGG |
| | | GCGTCCTCCTTGCAA |
| | | TCGGGAGTGCCAAGC |
| | | CGCTTTTCTGGTTCC |
| | | GGGAGCGGGACTGAC |
| | | TTCACCCTGACTATT |
| | | AGCAGCCTGCAGCCC |
| | | GAAGATTTCGCTACC |
| | | TACTACTGCTTCCAG |
| | | TACCGGCACATGCCC |
| | | TCACAAACCTTCGGA |
| | | CAGGGCACCAAAGTC |
| | | GAGATCAAGCGTACG |
| | | GTGGCCGCTCCCAGC |
| | | GTGTTCATCTTCCCC |
| | | CCCAGCGACGAGCAG |
| | | CTGAAGAGCGGCACC |
| | | GCCAGCGTGGTGTGC |
| | | CTGCTGAACAACTTC |
| | | TACCCCCGGGAGGCC |
| | | AAGGTGCAGTGGAAG |
| | | GTGGACAACGCCCTG |
| | | CAGAGCGGCAACAGC |
| | | CAGGAGAGCGTCACC |
| | | GAGCAGGACAGCAAG |
| | | GACTCCACCTACAGC |
| | | CTGAGCAGCACCCTG |
| | | ACCCTGAGCAAGGCC |
| | | GACTACGAGAAGCAT |
| | | AAGGTGTACGCCTGC |
| | | GAGGTGACCCACCAG |
| | | GGCCTGTCCAGCCCC |
| | | GTGACCAAGAGCTTC |
| | | AACAGGGGCGAGTGC |

MOR44698E

| | | |
|---|---|---|
| SEQ ID NO: | HCDR1 | GYTFTGYHMS |
| 2586 | (Combined) | |
| SEQ ID NO: | HCDR2 | VINPVSGNTVYAQKF |
| 2587 | (Combined) | QG |
| SEQ ID NO: | HCDR3 | IPSYTYAFDY |
| 2588 | (Combined) | |
| SEQ ID NO: | HCDR1 (Kabat) | GYHMS |
| 2589 | | |
| SEQ ID NO: | HCDR2 (Kabat) | VINPVSGNTVYAQKF |
| 2587 | | QG |
| SEQ ID NO: | HCDR3 (Kabat) | IPSYTYAFDY |
| 2588 | | |
| SEQ ID NO: | HCDR1 | GYTFTGY |
| 2590 | (Chothia} | |
| SEQ ID NO: | HCDR2 | NPVSGN |
| 2591 | (Chothia) | |
| SEQ ID NO: | HCDR3 | IPSYTYAFDY |
| 2588 | (Chothia) | |
| SEQ ID NO: | HCDR1 (IMGT) | GYTFTGYH |
| 2592 | | |
| SEQ ID NO: | HCDR2 (IMGT) | INPVSGNT |
| 2593 | | |
| SEQ ID NO: | HCDR3 (IMGT) | ARIPSYTYAFDY |
| 2594 | | |
| SEQ ID NO: | VH | QVQLVQSGAEVKKPG |
| 2595 | | ASVKVSCKASGYTFT |
| | | GYHMSWVRQAPGQGL |
| | | EWMGVINPVSGNTVY |
| | | AQKFQGRVTMTRDTS |
| | | ISTAYMELSRLRSED |
| | | TAVYYCARIPSYTYA |
| | | FDYWGQGTLVTVSS |
| SEQ ID NO: | DNA VH | CAAGTGCAACTCGTG |
| 2610 | | CAGTCAGGAGCCGAA |
| | | GTCAAGAAGCCTGGA |
| | | GCCTCGGTCAAGGTG |
| | | TCCTGCAAGGCCAGC |
| | | GGATACACTTTCACT |
| | | GGATACCACATGTCG |
| | | TGGGTCAGACAGGCT |
| | | CCTGGCCAAGGGCTG |
| | | GAGTGGATGGGCGTC |
| | | ATCAACCCGGTGTCG |
| | | GGTAATACCGTGTAC |
| | | GCCCAGAAGTTCCAG |
| | | GGTCGCGTGACCATG |
| | | ACCCGGGATACCTCC |
| | | ATTAGCACCGCGTAC |
| | | ATGGAGCTCAGCCGG |
| | | TTGAGATCCGAGGAT |
| | | ACCGCCGTGTACTAC |
| | | TGTGCGCGGATCCCG |
| | | TCCTACACTTACGCC |
| | | TTCGACTATTGGGGC |
| | | CAGGGGACTCTTGTC |
| | | ACCGTGTCCTCG |
| SEQ ID NO: | Heavy Chain | QVQLVQSGAEVKKPG |
| 2619 | | ASVKVSCKASGYTFT |
| | | GYHMSWVRQAPGQGL |
| | | EWMGVINPVSGNTVY |
| | | AQKFQGRVTMTRDTS |
| | | ISTAYMELSRLRSED |
| | | TAVYYCARIPSYTYA |
| | | FDYWGQGTLVTVSSA |
| | | STKGPSVFPLAPSSK |
| | | STSGGTAALGCLVKD |
| | | YFPEPVTVSWNSGAL |
| | | TSGVHTFPAVLQSSG |
| | | LYSLSSVVTVPSSSL |
| | | GTQTYICNVNHKPSN |
| | | TKVDKRVEPKSCDKT |
| | | HTCPPCPAPELLGGP |
| | | SVFLFPPKPKDTLMI |
| | | SRTPEVTCVVVAVSH |
| | | EDPEVKFNWYVDGVE |
| | | VHNAKTKPREEQYNS |
| | | TYRVVSVLTVLHQDW |
| | | LNGKEYKCKVSNKAL |
| | | AAPIEKTISKAKGQP |
| | | REPQVYTLPPSREEM |
| | | TKNQVSLTCLVKGFY |
| | | PSDIAVEWESNGQPE |
| | | NNYKTTPPVLDSDGS |
| | | FFLYSKLTVDKSRWQ |
| | | QGNVFSCSVLHEALH |
| | | SHYTQKSLSLSPGK |
| SEQ ID NO: | DNA Heavy | CAAGTGCAACTCGTG |
| 2620 | Chain | CAGTCAGGAGCCGAA |
| | | GTCAAGAAGCCTGGA |
| | | GCCTCGGTCAAGGTG |
| | | TCCTGCAAGGCCAGC |
| | | GGATACACTTTCACT |
| | | GGATACCACATGTCG |
| | | TGGGTCAGACAGGCT |
| | | CCTGGCCAAGGGCTG |
| | | GAGTGGATGGGCGTC |
| | | ATCAACCCGGTGTCG |
| | | GGTAATACCGTGTAC |
| | | GCCCAGAAGTTCCAG |
| | | GGTCGCGTGACCATG |
| | | ACCCGGGATACCTCC |
| | | ATTAGCACCGCGTAC |
| | | ATGGAGCTCAGCCGG |
| | | TTGAGATCCGAGGAT |
| | | ACCGCCGTGTACTAC |
| | | TGTGCGCGGATCCCG |
| | | TCCTACACTTACGCC |
| | | TTCGACTATTGGGGC |
| | | CAGGGGACTCTTGTC |
| | | ACCGTGTCCTCGGCC |
| | | TCCACTAAGGGCCCG |
| | | TCAGTGTTCCCCCTT |
| | | GCGCCATCCTCGAAG |
| | | TCAACCTCCGGAGGA |
| | | ACTGCCGCACTGGGT |
| | | TGCCTCGTGAAAGAC |
| | | TATTTCCCGGAACCC |
| | | GTCACTGTCTCCTGG |
| | | AACTCAGGAGCGCTC |
| | | ACCAGCGGAGTGCAT |
| | | ACCTTTCCTGCGGTG |
| | | CTGCAGTCCAGCGGC |
| | | CTGTACTCCCTGAGC |
| | | TCCGTCGTGACCGTC |
| | | CCCTCGTCGTCCCTG |
| | | GGAACCCAAACCTAC |
| | | ATTTGCAACGTCAAT |
| | | CACAAGCCAAGCAAC |
| | | ACTAAGGTGGACAAG |
| | | AGAGTGGAGCCCAAG |
| | | TCCTGCGATAAGACC |
| | | CACACCTGTCCTCCC |
| | | TGTCCGGCACCTGAA |
| | | CTGCTTGGTGGACCT |
| | | TCCGTGTTCCTGTTC |
| | | CCGCCCAAGCCAAAA |
| | | GACACCCTGATGATC |
| | | TCCCGCACTCCGGAA |
| | | GTCACTTGCGTGGTC |
| | | GTGGCCGTGTCCCAC |
| | | GAGGACCCCGAGGTC |
| | | AAGTTTAATTGGTAC |
| | | GTGGACGGAGTGGAA |
| | | GTGCACAACGCCAAG |
| | | ACCAAGCCGCGGGAA |
| | | GAACAGTACAACTCC |
| | | ACCTACCGCGTGGTG |
| | | TCCGTCCTGACTGTG |
| | | CTCCACCAGGACTGG |
| | | CTGAACGGAAAGGAG |
| | | TACAAGTGCAAAGTG |
| | | TCCAACAAGGCACTG |
| | | GCTGCCCCTATCGAA |
| | | AAGACTATCTCCAAG |
| | | GCCAAGGGCCAACCT |
| | | AGGGAGCCCCAGGTG |
| | | TACACGTTGCCTCCT |
| | | TCCCGCGAAGAAATG |
| | | ACTAAGAACCAGGTG |
| | | TCGCTGACCTGTCTC |
| | | GTGAAAGGGTTCTAC |
| | | CCCTCTGACATCGCC |
| | | GTGGAATGGGAGTCA |
| | | AACGGACAGCCTGAG |
| | | AACAACTATAAGACC |
| | | ACACCACCTGTCCTG |
| | | GACTCCGACGGCTCC |
| | | TTCTTCCTGTACTCA |
| | | AAGTTGACCGTGGAC |
| | | AAGTCGCGGTGGCAA |
| | | CAGGGCAACGTGTTC |
| | | TCTTGCTCCGTGCTG |
| | | CACGAAGCCCTGCAC |
| | | AGCCACTACACCCAA |
| | | AAGTCGCTCAGCCTC |
| | | TCCCCCGGAAAG |
| SEQ ID NO: | LCDR1 | RASQDISNYLA |
| 2599 | (Combined) | |
| SEQ ID NO: | LCDR2 | RASSLQS |
| 2600 | (Combined) | |
| SEQ ID NO: | LCDR3 | FQYRHMPSQT |
| 2601 | (Combined) | |
| SEQ ID NO: | LCDR1 (Kabat) | RASQDISNYLA |
| 2599 | | |
| SEQ ID NO: | LCDR2 (Kabat) | RASSLQS |
| 2600 | | |
| SEQ ID NO: | LCDR3 (Kabat) | FQYRHMPSQT |
| 2601 | | |
| SEQ ID NO: | LCDR1 | SQDISNY |
| 2602 | (Chothia} | |
| SEQ ID NO: | LCDR2 | RAS |
| 2603 | (Chothia} | |
| SEQ ID NO: | LCDR3 | YRHMPSQ |
| 2604 | (Chothia) | |
| SEQ ID NO: | LCDR1 (IMGT) | QDISNY |
| 2605 | | |
| SEQ ID NO: | LCDR2 (IMGT) | RAS |
| 2603 | | |
| SEQ ID NO: | LCDR3 (IMGT) | FQYRHMPSQT |
| 2601 | | |
| SEQ ID NO: | VL | DIQMTQSPSSLSASV |
| 2606 | | GDRVTITCRASQDIS |
| | | NYLAWYQQKPGKAPK |
| | | LLIYRASSLQSGVPS |
| | | RFSGSGSGTDFTLTI |
| | | SSLQPEDFATYYCFQ |
| | | YRHMPSQTFGQGTKV |
| | | EIK |
| SEQ ID NO: | DNA VL | GACATTCAGATGACC |
| 2613 | | CAGTCCCCGTCGTCC |
| | | CTGTCCGCATCCGTG |
| | | GGCGACAGAGTCACC |
| | | ATCACTTGCCGGGCC |
| | | TCACAGGATATTTCC |
| | | AACTACCTGGCCTGG |
| | | TATCAGCAGAAGCCT |
| | | GGAAAGGCCCCGAAG |
| | | CTGCTGATCTACCGG |
| | | GCGTCCTCCTTGCAA |
| | | TCGGGAGTGCCAAGC |
| | | CGCTTTTCTGGTTCC |
| | | GGGAGCGGGACTGAC |
| | | TTCACCCTGACTATT |
| | | AGCAGCCTGCAGCCC |
| | | GAAGATTTCGCTACC |
| | | TACTACTGCTTCCAG |
| | | TACCGGCACATGCCC |
| | | TCACAAACCTTCGGA |
| | | CAGGGCACCAAAGTC |
| | | GAGATCAAG |
| SEQ ID NO: | Light Chain | DIQMTQSPSSLSASV |
| 2608 | | GDRVTITCRASQDIS |
| | | NYLAWYQQKPGKAPK |
| | | LLIYRASSLQSGVPS |
| | | RFSGSGSGTDFTLTI |
| | | SSLQPEDFATYYCFQ |
| | | YRHMPSQTFGQGTKV |
| | | EIKRTVAAPSVFIFP |
| | | PSDEQLKSGTASVVC |
| | | LLNNFYPREAKVQWK |
| | | VDNALQSGNSQESVT |
| | | EQDSKDSTYSLSSTL |
| | | TLSKADYEKHKVYAC |
| | | EVTHQGLSSPVTKSF |
| | | NRGEC |
| SEQ ID NO: | DNA Light | GACATTCAGATGACC |
| 2614 | Chain | CAGTCCCCGTCGTCC |
| | | CTGTCCGCATCCGTG |
| | | GGCGACAGAGTCACC |
| | | ATCACTTGCCGGGCC |
| | | TCACAGGATATTTCC |
| | | AACTACCTGGCCTGG |
| | | TATCAGCAGAAGCCT |
| | | GGAAAGGCCCCGAAG |
| | | CTGCTGATCTACCGG |
| | | GCGTCCTCCTTGCAA |
| | | TCGGGAGTGCCAAGC |
| | | CGCTTTTCTGGTTCC |
| | | GGGAGCGGGACTGAC |
| | | TTCACCCTGACTATT |
| | | AGCAGCCTGCAGCCC |
| | | GAAGATTTCGCTACC |
| | | TACTACTGCTTCCAG |
| | | TACCGGCACATGCCC |
| | | TCACAAACCTTCGGA |
| | | CAGGGCACCAAAGTC |
| | | GAGATCAAGCGTACG |
| | | GTGGCCGCTCCCAGC |
| | | GTGTTCATCTTCCCC |
| | | CCCAGCGACGAGCAG |
| | | CTGAAGAGCGGCACC |
| | | GCCAGCGTGGTGTGC |
| | | CTGCTGAACAACTTC |
| | | TACCCCCGGGAGGCC |
| | | AAGGTGCAGTGGAAG |
| | | GTGGACAACGCCCTG |
| | | CAGAGCGGCAACAGC |
| | | CAGGAGAGCGTCACC |
| | | GAGCAGGACAGCAAG |
| | | GACTCCACCTACAGC |
| | | CTGAGCAGCACCCTG |
| | | ACCCTGAGCAAGGCC |
| | | GACTACGAGAAGCAT |
| | | AAGGTGTACGCCTGC |
| | | GAGGTGACCCACCAG |
| | | GGCCTGTCCAGCCCC |
| | | GTGACCAAGAGCTTC |
| | | AACAGGGGCGAGTGC |

MOR44698F

| | | |
|---|---|---|
| SEQ ID NO: | HCDR1 | GYTFTGYHMS |
| 2586 | (Combined) | |
| SEQ ID NO: | HCDR2 | VINPVSGNTVYAQKF |
| 2587 | (Combined) | QG |
| SEQ ID NO: | HCDR3 | IPSYTYAFDY |
| 2588 | (Combined) | |
| SEQ ID NO: | HCDR1 (Kabat) | GYHMS |
| 2589 | | |
| SEQ ID NO: | HCDR2 (Kabat) | VINPVSGNTVYAQKF |
| 2587 | | QG |
| SEQ ID NO: | HCDR3 (Kabat) | IPSYTYAFDY |
| 2588 | | |
| SEQ ID NO: | HCDR1 | GYTFTGY |
| 2590 | (Chothia) | |
| SEQ ID NO: | HCDR2 | NPVSGN |
| 2591 | (Chothia) | |
| SEQ ID NO: | HCDR3 | IPSYTYAFDY |
| 2588 | (Chothia) | |
| SEQ ID NO: | HCDR1 (IMGT) | GYTFTGYH |
| 2592 | | |
| SEQ ID NO: | HCDR2 (IMGT) | INPVSGNT |
| 2593 | | |
| SEQ ID NO: | HCDR3 (IMGT) | ARIPSYTYAFDY |
| 2594 | | |
| SEQ ID NO: | VH | QVQLVQSGAEVKKPG |
| 2595 | | ASVKVSCKASGYTFT |
| | | GYHMSWVRQAPGQGL |
| | | EWMGVINPVSGNTVY |
| | | AQKFQGRVTMTRDTS |
| | | ISTAYMELSRLRSED |
| | | TAVYYCARIPSYTYA |
| | | FDYWGQGTLVTVSS |
| SEQ ID NO: | DNA VH | CAAGTGCAACTCGTG |
| 2610 | | CAGTCAGGAGCCGAA |
| | | GTCAAGAAGCCTGGA |
| | | GCCTCGGTCAAGGTG |
| | | TCCTGCAAGGCCAGC |
| | | GGATACACTTTCACT |
| | | GGATACCACATGTCG |
| | | TGGGTCAGACAGGCT |
| | | CCTGGCCAAGGGCTG |
| | | GAGTGGATGGGCGTC |
| | | ATCAACCCGGTGTCG |
| | | GGTAATACCGTGTAC |
| | | GCCCAGAAGTTCCAG |
| | | GGTCGCGTGACCATG |
| | | ACCCGGGATACCTCC |
| | | ATTAGCACCGCGTAC |
| | | ATGGAGCTCAGCCGG |
| | | TTGAGATCCGAGGAT |
| | | ACCGCCGTGTACTAC |
| | | TGTGCGCGGATCCCG |
| | | TCCTACACTTACGCC |
| | | TTCGACTATTGGGGC |
| | | CAGGGGACTCTTGTC |
| | | ACCGTGTCCTCG |
| SEQ ID NO: | Heavy Chain | QVQLVQSGAEVKKPG |
| 2621 | | ASVKVSCKASGYTFT |
| | | GYHMSWVRQAPGQGL |
| | | EWMGVINPVSGNTVY |
| | | AQKFQGRVTMTRDTS |
| | | ISTAYMELSRLRSED |
| | | TAVYYCARIPSYTYA |
| | | FDYWGQGTLVTVSSA |
| | | STKGPSVFPLAPSSK |
| | | STSGGTAALGCLVKD |
| | | YFPEPVTVSWNSGAL |
| | | TSGVHTFPAVLQSSG |
| | | LYSLSSVVTVPSSSL |
| | | GTQTYICNVNHKPSN |
| | | TKVDKRVEPKSCDKT |
| | | HTCPPCPAPELLGGP |
| | | SVFLFPPKPKDTLYI |
| | | TREPEVTCVVVDVSH |
| | | EDPEVKFNWYVDGVE |
| | | VHNAKTKPREEQYNS |
| | | TYRVVSVLTVLHQDW |
| | | LNGKEYKCKVSNKAL |
| | | PAPIEKTISKAKGQP |
| | | REPQVYTLPPSREEM |
| | | TKNQVSLTCLVKGFY |
| | | PSDIAVEWESNGQPE |
| | | NNYKTTPPVLDSDGS |
| | | FFLYSKLTVDKSRWQ |
| | | QGNVFSCSVMHEALH |
| | | NHYTQKSLSLSPGK |
| SEQ ID NO: | DNA Heavy | CAAGTGCAACTCGTG |
| 2622 | Chain | CAGTCAGGAGCCGAA |
| | | GTCAAGAAGCCTGGA |
| | | GCCTCGGTCAAGGTG |
| | | TCCTGCAAGGCCAGC |
| | | GGATACACTTTCACT |
| | | GGATACCACATGTCG |
| | | TGGGTCAGACAGGCT |
| | | CCTGGCCAAGGGCTG |
| | | GAGTGGATGGGCGTC |
| | | ATCAACCCGGTGTCG |
| | | GGTAATACCGTGTAC |
| | | GCCCAGAAGTTCCAG |
| | | GGTCGCGTGACCATG |
| | | ACCCGGGATACCTCC |
| | | ATTAGCACCGCGTAC |
| | | ATGGAGCTCAGCCGG |
| | | TTGAGATCCGAGGAT |
| | | ACCGCCGTGTACTAC |
| | | TGTGCGCGGATCCCG |
| | | TCCTACACTTACGCC |
| | | TTCGACTATTGGGGC |
| | | CAGGGGACTCTTGTC |
| | | ACCGTGTCCTCGGCC |
| | | TCCACTAAGGGCCCG |
| | | TCAGTGTTCCCCCTT |
| | | GCGCCATCCTCGAAG |
| | | TCAACCTCCGGAGGA |
| | | ACTGCCGCACTGGGT |
| | | TGCCTCGTGAAAGAC |
| | | TATTTCCCGGAACCC |
| | | GTCACTGTCTCCTGG |
| | | AACTCAGGAGCGCTC |
| | | ACCAGCGGAGTGCAT |
| | | ACCTTTCCTGCGGTG |
| | | CTGCAGTCCAGCGGC |
| | | CTGTACTCCCTGAGC |
| | | TCCGTCGTGACCGTC |
| | | CCCTCGTCGTCCCTG |
| | | GGAACCCAAACCTAC |
| | | ATTTGCAACGTCAAT |
| | | CACAAGCCAAGCAAC |
| | | ACTAAGGTGGACAAG |
| | | AGAGTGGAGCCCAAG |
| | | TCCTGCGATAAGACC |
| | | CACACCTGTCCTCCC |
| | | TGTCCGGCACCTGAA |
| | | CTGCTTGGTGGACCT |
| | | TCCGTGTTCCTGTTC |
| | | CCGCCCAAGCCAAAA |
| | | GACACCCTGTATATC |
| | | ACTCGCGAACCGGAA |
| | | GTCACTTGCGTGGTC |
| | | GTGGACGTGTCCCAC |
| | | GAGGACCCCGAGGTC |
| | | AAGTTTAATTGGTAC |
| | | GTGGACGGAGTGGAA |
| | | GTGCACAACGCCAAG |
| | | ACCAAGCCGCGGGAA |
| | | GAACAGTACAACTCC |
| | | ACCTACCGCGTGGTG |
| | | TCCGTCCTGACTGTG |
| | | CTCCACCAGGACTGG |
| | | CTGAACGGAAAGGAG |
| | | TACAAGTGCAAAGTG |
| | | TCCAACAAGGCACTG |
| | | CCAGCCCCTATCGAA |
| | | AAGACTATCTCCAAG |
| | | GCCAAGGGCCAACCT |
| | | AGGGAGCCCCAGGTG |
| | | TACACGTTGCCTCCT |
| | | TCCCGCGAAGAAATG |
| | | ACTAAGAACCAGGTG |
| | | TCGCTGACCTGTCTC |
| | | GTGAAAGGGTTCTAC |
| | | CCCTCTGACATCGCC |
| | | GTGGAATGGGAGTCA |
| | | AACGGACAGCCTGAG |
| | | AACAACTATAAGACC |
| | | ACACCACCTGTCCTG |
| | | GACTCCGACGGCTCC |
| | | TTCTTCCTGTACTCA |
| | | AAGTTGACCGTGGAC |
| | | AAGTCGCGGTGGCAA |
| | | CAGGGCAACGTGTTC |
| | | TCTTGCTCCGTGATG |
| | | CACGAAGCCCTGCAC |
| | | AACCACTACACCCAA |
| | | AAGTCGCTCAGCCTC |
| | | TCCCCCGGAAAG |
| SEQ ID NO: | LCDR1 | RASQDISNYLA |
| 2599 | (Combined) | |
| SEQ ID NO: | LCDR2 | RASSLQS |
| 2600 | (Combined) | |
| SEQ ID NO: | LCDR3 | FQYRHMPSQT |
| 2601 | (Combined) | |
| SEQ ID NO: | LCDR1 (Kabat) | RASQDISNYLA |
| 2599 | | |
| SEQ ID NO: | LCDR2 (Kabat) | RASSLQS |
| 2600 | | |
| SEQ ID NO: | LCDR3 (Kabat) | FQYRHMPSQT |
| 2601 | | |
| SEQ ID NO: | LCDR1 | SQDISNY |
| 2602 | (Chothia) | |
| SEQ ID NO: | LCDR2 | RAS |
| 2603 | (Chothia} | |
| SEQ ID NO: | LCDR3 | YRHMPSQ |
| 2604 | (Chothia) | |
| SEQ ID NO: | LCDR1 (IMGT) | QDISNY |
| 2605 | | |
| SEQ ID NO: | LCDR2 (IMGT) | RAS |
| 2603 | | |
| SEQ ID NO: | LCDR3 (IMGT) | FQYRHMPSQT |
| 2601 | | |
| SEQ ID NO: | VL | DIQMTQSPSSLSASV |
| 2606 | | GDRVTITCRASQDIS |
| | | NYLAWYQQKPGKAPK |
| | | LLIYRASSLQSGVPS |
| | | RFSGSGSGTDFTLTI |
| | | SSLQPEDFATYYCFQ |
| | | YRHMPSQTFGQGTKV |
| | | EIK |
| SEQ ID NO: | DNA VL | GACATTCAGATGACC |
| 2613 | | CAGTCCCCGTCGTCC |
| | | CTGTCCGCATCCGTG |
| | | GGCGACAGAGTCACC |
| | | ATCACTTGCCGGGCC |
| | | TCACAGGATATTTCC |
| | | AACTACCTGGCCTGG |
| | | TATCAGCAGAAGCCT |
| | | GGAAAGGCCCCGAAG |
| | | CTGCTGATCTACCGG |
| | | GCGTCCTCCTTGCAA |
| | | TCGGGAGTGCCAAGC |
| | | CGCTTTTCTGGTTCC |
| | | GGGAGCGGGACTGAC |
| | | TTCACCCTGACTATT |
| | | AGCAGCCTGCAGCCC |
| | | GAAGATTTCGCTACC |
| | | TACTACTGCTTCCAG |
| | | TACCGGCACATGCCC |
| | | TCACAAACCTTCGGA |
| | | CAGGGCACCAAAGTC |
| | | GAGATCAAG |
| SEQ ID NO: | Light Chain | DIQMTQSPSSLSASV |
| 2608 | | GDRVTITCRASQDIS |
| | | NYLAWYQQKPGKAPK |
| | | LLIYRASSLQSGVPS |
| | | RFSGSGSGTDFTLTI |
| | | SSLQPEDFATYYCFQ |
| | | YRHMPSQTFGQGTKV |
| | | EIKRTVAAPSVFIFP |
| | | PSDEQLKSGTASVVC |
| | | LLNNFYPREAKVQWK |
| | | VDNALQSGNSQESVT |
| | | EQDSKDSTYSLSSTL |
| | | TLSKADYEKHKVYAC |
| | | EVTHQGLSSPVTKSF |
| | | NRGEC |
| SEQ ID NO: | DNA Light | GACATTCAGATGACC |
| 2614 | Chain | CAGTCCCCGTCGTCC |
| | | CTGTCCGCATCCGTG |
| | | GGCGACAGAGTCACC |
| | | ATCACTTGCCGGGCC |
| | | TCACAGGATATTTCC |
| | | AACTACCTGGCCTGG |
| | | TATCAGCAGAAGCCT |
| | | GGAAAGGCCCCGAAG |
| | | CTGCTGATCTACCGG |
| | | GCGTCCTCCTTGCAA |
| | | TCGGGAGTGCCAAGC |
| | | CGCTTTTCTGGTTCC |
| | | GGGAGCGGGACTGAC |
| | | TTCACCCTGACTATT |
| | | AGCAGCCTGCAGCCC |
| | | GAAGATTTCGCTACC |
| | | TACTACTGCTTCCAG |
| | | TACCGGCACATGCCC |
| | | TCACAAACCTTCGGA |
| | | CAGGGCACCAAAGTC |
| | | GAGATCAAGCGTACG |
| | | GTGGCCGCTCCCAGC |
| | | GTGTTCATCTTCCCC |
| | | CCCAGCGACGAGCAG |
| | | CTGAAGAGCGGCACC |
| | | GCCAGCGTGGTGTGC |
| | | CTGCTGAACAACTTC |
| | | TACCCCCGGGAGGCC |
| | | AAGGTGCAGTGGAAG |
| | | GTGGACAACGCCCTG |
| | | CAGAGCGGCAACAGC |
| | | CAGGAGAGCGTCACC |
| | | GAGCAGGACAGCAAG |
| | | GACTCCACCTACAGC |
| | | CTGAGCAGCACCCTG |
| | | ACCCTGAGCAAGGCC |
| | | GACTACGAGAAGCAT |
| | | AAGGTGTACGCCTGC |
| | | GAGGTGACCCACCAG |
| | | GGCCTGTCCAGCCCC |
| | | GTGACCAAGAGCTTC |
| | | AACAGGGGCGAGTGC |

MOR44746A

| | | |
|---|---|---|
| SEQ ID NO: | HCDR1 | GDSVSSSSAAWN |
| 2623 | (Combined) | |
| SEQ ID NO: | HCDR2 | HIGYRSKWYNEYAVS |
| 2624 | (Combined) | VKS |
| SEQ ID NO: | HCDR3 | GMYGSVPYKEGYYFD |
| 2625 | (Combined) | I |
| SEQ ID NO: | HCDR1 (Kabat) | SSSAAWN |
| 2626 | | |
| SEQ ID NO: | HCDR2 (Kabat) | HIGYRSKWYNEYAVS |
| 2624 | | VKS |
| SEQ ID NO: | HCDR3 (Kabat) | GMYGSVPYKEGYYFD |
| 2625 | | I |
| SEQ ID NO: | HCDR1 | GDSVSSSSA |
| 2627 | (Chothia) | |
| SEQ ID NO: | HCDR2 | GYRSKWY |
| 2628 | (Chothia) | |
| SEQ ID NO: | HCDR3 | GMYGSVPYKEGYYFD |
| 2625 | (Chothia) | I |
| SEQ ID NO: | HCDR1 (IMGT) | GDSVSSSSAA |
| 2629 | | |
| SEQ ID NO: | HCDR2 (IMGT) | IGYRSKWYN |
| 2630 | | |
| SEQ ID NO: | HCDR3 (IMGT) | ARGMYGSVPYKEGYY |
| 2631 | | FDI |
| SEQ ID NO: | VH | QVQLQQSGPGLVKPS |
| 2632 | | QTLSLTCAISGDSVS |
| | | SSSAAWNWIRQSPSR |
| | | GLEWLGHIGYRSKWY |
| | | NEYAVSVKSRITINP |
| | | DTSKNQFSLQLNSVT |
| | | PEDTAVYYCARGMYG |
| | | SVPYKEGYYFDIWGQ |
| | | GTLVTVSS |
| SEQ ID NO: | DNA VH | CAGGTGCAATTGCAG |
| 2633 | | CAGAGCGGTCCGGGC |
| | | CTGGTGAAACCGAGC |
| | | CAGACCCTGAGCCTG |
| | | ACCTGCGCGATTTCC |
| | | GGAGATAGCGTGAGC |
| | | TCTTCTTCTGCTGCT |
| | | TGGAACTGGATTCGT |
| | | CAGAGCCCGAGCCGT |
| | | GGCCTCGAGTGGCTG |
| | | GGCCATATCGGTTAC |
| | | CGTAGCAAATGGTAC |
| | | AACGAATATGCCGTG |
| | | AGCGTGAAAAGCCGC |
| | | ATTACCATTAACCCG |
| | | GATACTTCGAAAAAC |
| | | CAGTTTAGCCTGCAA |
| | | CTGAACAGCGTGACC |
| | | CCGGAAGATACGGCC |
| | | GTGTATTATTGCGCG |
| | | CGTGGTATGTACGGT |
| | | TCTGTTCCCTACAAA |
| | | GAAGGTTACTACTTC |
| | | GATATTTGGGGCCAA |
| | | GGCACCCTGGTGACT |
| | | GTTAGCTCA |
| SEQ ID NO: | Heavy Chain | QVQLQQSGPGLVKPS |
| 2634 | | QTLSLTCAISGDSVS |
| | | SSSAAWNWIRQSPSR |
| | | GLEWLGHIGYRSKWY |
| | | NEYAVSVKSRITINP |
| | | DTSKNQFSLQLNSVT |
| | | PEDTAVYYCARGMYG |
| | | SVPYKEGYYFDIWGQ |
| | | GTLVTVSSASTKGPS |
| | | VFPLAPSSKSTSGGT |
| | | AALGCLVKDYFPEPV |
| | | TVSWNSGALTSGVHT |
| | | FPAVLQSSGLYSLSS |
| | | VVTVPSSSLGTQTYI |
| | | CNVNHKPSNTKVDKR |
| | | VEPKSCDKTHTCPPC |
| | | PAPEAAGGPSVFLFP |
| | | PKPKDTLMISRTPEV |
| | | TCVVVDVSHEDPEVK |
| | | FNWYVDGVEVHNAKT |
| | | KPREEQYNSTYRVVS |
| | | VLTVLHQDWLNGKEY |
| | | KCKVSNKALPAPIEK |
| | | TISKAKGQPREPQVY |
| | | TLPPSREEMTKNQVS |
| | | LTCLVKGFYPSDIAV |
| | | EWESNGQPENNYKTT |
| | | PPVLDSDGSFFLYSK |
| | | LTVDKSRWQQGNVFS |
| | | CSVMHEALHNHYTQK |
| | | SLSLSPGK |
| SEQ ID NO: | DNA Heavy | CAGGTGCAATTGCAG |
| 2635 | Chain | CAGAGCGGTCCGGGC |
| | | CTGGTGAAACCGAGC |
| | | CAGACCCTGAGCCTG |
| | | ACCTGCGCGATTTCC |
| | | GGAGATAGCGTGAGC |
| | | TCTTCTTCTGCTGCT |
| | | TGGAACTGGATTCGT |
| | | CAGAGCCCGAGCCGT |
| | | GGCCTCGAGTGGCTG |
| | | GGCCATATCGGTTAC |
| | | CGTAGCAAATGGTAC |
| | | AACGAATATGCCGTG |
| | | AGCGTGAAAAGCCGC |
| | | ATTACCATTAACCCG |
| | | GATACTTCGAAAAAC |
| | | CAGTTTAGCCTGCAA |
| | | CTGAACAGCGTGACC |
| | | CCGGAAGATACGGCC |
| | | GTGTATTATTGCGCG |
| | | CGTGGTATGTACGGT |
| | | TCTGTTCCCTACAAA |
| | | GAAGGTTACTACTTC |
| | | GATATTTGGGGCCAA |
| | | GGCACCCTGGTGACT |
| | | GTTAGCTCAGCCTCC |
| | | ACCAAGGGTCCATCG |
| | | GTCTTCCCCCTGGCA |
| | | CCCTCCTCCAAGAGC |
| | | ACCTCTGGGGGCACA |
| | | GCGGCCCTGGGCTGC |
| | | CTGGTCAAGGACTAC |
| | | TTCCCCGAACCGGTG |
| | | ACGGTGTCGTGGAAC |
| | | TCAGGCGCCCTGACC |
| | | AGCGGCGTGCACACC |
| | | TTCCCGGCTGTCCTA |
| | | CAGTCCTCAGGACTC |
| | | TACTCCCTCAGCAGC |
| | | GTGGTGACCGTGCCC |
| | | TCCAGCAGCTTGGGC |
| | | ACCCAGACCTACATC |
| | | TGCAACGTGAATCAC |
| | | AAGCCCAGCAACACC |
| | | AAGGTGGACAAGAGA |
| | | GTTGAGCCCAAATCT |
| | | TGTGACAAAACTCAC |
| | | ACATGCCCACCGTGC |
| | | CCAGCACCTGAAGCA |
| | | GCGGGGGGACCGTCA |
| | | GTCTTCCTCTTCCCC |
| | | CCAAAACCCAAGGAC |
| | | ACCCTCATGATCTCC |
| | | CGGACCCCTGAGGTC |
| | | ACATGCGTGGTGGTG |
| | | GACGTGAGCCACGAA |
| | | GACCCTGAGGTCAAG |
| | | TTCAACTGGTACGTG |
| | | GACGGCGTGGAGGTG |
| | | CATAATGCCAAGACA |
| | | AAGCCGCGGGAGGAG |
| | | CAGTACAACAGCACG |
| | | TACCGGGTGGTCAGC |
| | | GTCCTCACCGTCCTG |
| | | CACCAGGACTGGCTG |
| | | AATGGCAAGGAGTAC |
| | | AAGTGCAAGGTCTCC |
| | | AACAAAGCCCTCCCA |
| | | GCCCCCATCGAGAAA |
| | | ACCATCTCCAAAGCC |
| | | AAAGGGCAGCCCCGA |
| | | GAACCACAGGTGTAC |
| | | ACCCTGCCCCCATCC |
| | | CGGGAGGAGATGACC |
| | | AAGAACCAGGTCAGC |
| | | CTGACCTGCCTGGTC |
| | | AAAGGCTTCTATCCC |
| | | AGCGACATCGCCGTG |
| | | GAGTGGGAGAGCAAT |
| | | GGGCAGCCGGAGAAC |
| | | AACTACAAGACCACG |
| | | CCTCCCGTGCTGGAC |
| | | TCCGACGGCTCCTTC |
| | | TTCCTCTACAGCAAG |
| | | CTCACCGTGGACAAG |
| | | AGCAGGTGGCAGCAG |
| | | GGGAACGTCTTCTCA |
| | | TGCTCCGTGATGCAT |
| | | GAGGCTCTGCACAAC |
| | | CACTACACGCAGAAG |
| | | AGCCTCTCCCTGTCT |
| | | CCGGGTAAA |
| SEQ ID NO: | LCDR1 | RASQGISSDLN |
| 2636 | (Combined) | |
| SEQ ID NO: | LCDR2 | AASNLQS |
| 2637 | (Combined) | |
| SEQ ID NO: | LCDR3 | QQYTDESMT |
| 2638 | (Combined) | |
| SEQ ID NO: | LCDR1 (Kabat) | RASQGISSDLN |
| 2636 | | |
| SEQ ID NO: | LCDR2 (Kabat) | AASNLQS |
| 2637 | | |
| SEQ ID NO: | LCDR3 (Kabat) | QQYTDESMT |
| 2638 | | |
| SEQ ID NO: | LCDR1 | SQGISSD |
| 2639 | (Chothia) | |
| SEQ ID NO: | LCDR2 | AAS |
| 2640 | (Chothia) | |
| SEQ ID NO: | LCDR3 | YTDESM |
| 2641 | (Chothia) | |
| SEQ ID NO: | LCDR1 (IMGT) | QGISSD |
| 2642 | | |
| SEQ ID NO: | LCDR2 (IMGT) | AAS |
| 2640 | | |
| SEQ ID NO: | LCDR3 (IMGT) | QQYTDESMT |
| 2638 | | |
| SEQ ID NO: | VL | DIQMTQSPSSLSASV |
| 2643 | | GDRVTITCRASQGIS |
| | | SDLNWYQQKPGKAPK |
| | | LLIYAASNLQSGVPS |
| | | RFSGSGSGTDFTLTI |
| | | SSLQPEDFATYYCQQ |
| | | YTDESMTFGQGTKVE |
| | | IK |
| SEQ ID NO: | DNA VL | GATATCCAGATGACC |
| 2644 | | CAGAGCCCGAGCAGC |
| | | CTGAGCGCCAGCGTG |
| | | GGCGATCGCGTGACC |
| | | ATTACCTGCAGAGCC |
| | | AGCCAGGGTATTTCT |
| | | TCTGACCTGAACTGG |
| | | TACCAGCAGAAACCG |
| | | GGCAAAGCGCCGAAA |
| | | CTATTAATCTACGCT |
| | | GCTTCTAACCTGCAA |
| | | AGCGGCGTGCCGAGC |
| | | CGCTTTAGCGGCAGC |
| | | GGATCCGGCACCGAT |
| | | TTCACCCTGACCATT |
| | | AGCTCTCTGCAACCG |
| | | GAAGACTTTGCGACC |
| | | TATTATTGCCAGCAG |
| | | TACACTGACGAATCT |
| | | ATGACCTTTGGCCAG |
| | | GGCACGAAAGTTGAA |
| | | ATTAAA |
| SEQ ID NO: | Light Chain | DIQMTQSPSSLSASV |
| 2645 | | GDRVTITCRASQGIS |
| | | SDLNWYQQKPGKAPK |
| | | LLIYAASNLQSGVPS |
| | | RFSGSGSGTDFTLTI |
| | | SSLQPEDFATYYCQQ |
| | | YTDESMTFGQGTKVE |
| | | IKRTVAAPSVFIFPP |
| | | SDEQLKSGTASVVCL |
| | | LNNFYPREAKVQWKV |
| | | DNALQSGNSQESVTE |
| | | QDSKDSTYSLSSTLT |
| | | LSKADYEKHKVYACE |
| | | VTHQGLSSPVTKSFN |
| | | RGEC |
| SEQ ID NO: | DNA Light | GATATCCAGATGACC |
| 2646 | Chain | CAGAGCCCGAGCAGC |
| | | CTGAGCGCCAGCGTG |
| | | GGCGATCGCGTGACC |
| | | ATTACCTGCAGAGCC |
| | | AGCCAGGGTATTTCT |
| | | TCTGACCTGAACTGG |
| | | TACCAGCAGAAACCG |
| | | GGCAAAGCGCCGAAA |
| | | CTATTAATCTACGCT |
| | | GCTTCTAACCTGCAA |
| | | AGCGGCGTGCCGAGC |
| | | CGCTTTAGCGGCAGC |
| | | GGATCCGGCACCGAT |
| | | TTCACCCTGACCATT |
| | | AGCTCTCTGCAACCG |
| | | GAAGACTTTGCGACC |
| | | TATTATTGCCAGCAG |
| | | TACACTGACGAATCT |
| | | ATGACCTTTGGCCAG |
| | | GGCACGAAAGTTGAA |
| | | ATTAAACGTACGGTG |
| | | GCCGCTCCCAGCGTG |
| | | TTCATCTTCCCCCCC |
| | | AGCGACGAGCAGCTG |
| | | AAGAGCGGCACCGCC |
| | | AGCGTGGTGTGCCTG |
| | | CTGAACAACTTCTAC |
| | | CCCCGGGAGGCCAAG |
| | | GTGCAGTGGAAGGTG |
| | | GACAACGCCCTGCAG |
| | | AGCGGCAACAGCCAG |
| | | GAAAGCGTCACCGAG |
| | | CAGGACAGCAAGGAC |
| | | TCCACCTACAGCCTG |
| | | AGCAGCACCCTGACC |
| | | CTGAGCAAGGCCGAC |
| | | TACGAGAAGCACAAG |
| | | GTGTACGCCTGCGAG |
| | | GTGACCCACCAGGGC |
| | | CTGTCCAGCCCCGTG |
| | | ACCAAGAGCTTCAAC |
| | | CGGGGCGAGTGT |

MOR44746B

| | | |
|---|---|---|
| SEQ ID NO: | HCDR1 | GDSVSSSSAAWN |
| 2623 | (Combined) | |
| SEQ ID NO: | HCDR2 | HIGYRSKWYNEYAVS |
| 2624 | (Combined) | VKS |
| SEQ ID NO: | HCDR3 | GMYGSVPYKEGYYFD |
| 2625 | (Combined) | I |
| SEQ ID NO: | HCDR1 (Kabat) | SSSAAWN |
| 2626 | | |
| SEQ ID NO: | HCDR2 (Kabat) | HIGYRSKWYNEYAVS |
| 2624 | | VKS |
| SEQ ID NO: | HCDR3 (Kabat) | GMYGSVPYKEGYYFD |
| 2625 | | I |
| SEQ ID NO: | HCDR1 | GDSVSSSSA |
| 2627 | (Chothia) | |
| SEQ ID NO: | HCDR2 | GYRSKWY |
| 2628 | (Chothia) | |
| SEQ ID NO: | HCDR3 | GMYGSVPYKEGYYFD |
| 2625 | (Chothia) | I |
| SEQ ID NO: | HCDR1 (IMGT) | GDSVSSSSAA |
| 2629 | | |
| SEQ ID NO: | HCDR2 (IMGT) | IGYRSKWYN |
| 2630 | | |
| SEQ ID NO: | HCDR3 (IMGT) | ARGMYGSVPYKEGYY |
| 2631 | | FDI |
| SEQ ID NO: | VH | QVQLQQSGPGLVKPS |
| 2632 | | QTLSLTCAISGDSVS |
| | | SSSAAWNWIRQSPSR |
| | | GLEWLGHIGYRSKWY |
| | | NEYAVSVKSRITINP |
| | | DTSKNQFSLQLNSVT |
| | | PEDTAVYYCARGMYG |
| | | SVPYKEGYYFDIWGQ |
| | | GTLVTVSS |
| SEQ ID NO: | DNA VH | CAAGTGCAACTCCAG |
| 2647 | | CAGTCAGGACCGGGG |
| | | TTGGTCAAGCCTTCG |
| | | CAGACCCTGTCCCTC |
| | | ACTTGCGCCATTAGC |
| | | GGAGATTCGGTGTCG |
| | | TCGTCGTCAGCCGCC |
| | | TGGAACTGGATTAGA |
| | | CAGTCCCCTTCCCGA |
| | | GGGCTGGAGTGGCTG |
| | | GGCCACATCGGATAC |
| | | CGCAGCAAGTGGTAC |
| | | AACGAATACGCCGTC |
| | | AGCGTGAAGTCACGC |
| | | ATCACCATCAACCCG |
| | | GATACTAGCAAGAAC |
| | | CAGTTCAGCCTCCAG |
| | | TTGAACTCCGTGACC |
| | | CCGGAGGATACCGCC |
| | | GTGTACTACTGTGCG |
| | | CGGGGCATGTACGGA |
| | | TCCGTGCCGTACAAG |
| | | GAGGGATACTACTTC |
| | | GACATTTGGGGCCAG |
| | | GGGACTCTTGTCACC |
| | | GTGTCCTCG |
| SEQ ID NO: | Heavy Chain | QVQLQQSGPGLVKPS |
| 2648 | | QTLSLTCAISGDSVS |
| | | SSSAAWNWIRQSPSR |
| | | GLEWLGHIGYRSKWY |
| | | NEYAVSVKSRITINP |
| | | DTSKNQFSLQLNSVT |
| | | PEDTAVYYCARGMYG |
| | | SVPYKEGYYFDIWGQ |
| | | GTLVTVSSASTKGPS |
| | | VFPLAPSSKSTSGGT |
| | | AALGCLVKDYFPEPV |
| | | TVSWNSGALTSGVHT |
| | | FPAVLQSSGLYSLSS |
| | | VVTVPSSSLGTQTYI |
| | | CNVNHKPSNTKVDKR |
| | | VEPKSCDKTHTCPPC |
| | | PAPELLGGPSVFLFP |
| | | PKPKDTLMISRTPEV |
| | | TCVVVDVSHEDPEVK |
| | | FNWYVDGVEVHNAKT |
| | | KPREEQYNSTYRVVS |
| | | VLTVLHQDWLNGKEY |
| | | KCKVSNKALPAPIEK |
| | | TISKAKGQPREPQVY |
| | | TLPPSREEMTKNQVS |
| | | LTCLVKGFYPSDIAV |
| | | EWESNGQPENNYKTT |
| | | PPVLDSDGSFFLYSK |
| | | LTVDKSRWQQGNVFS |
| | | CSVMHEALHNHYTQK |
| | | SLSLSPGK |
| SEQ ID NO: | DNA Heavy | CAAGTGCAACTCCAG |
| 2649 | Chain | CAGTCAGGACCGGGG |
| | | TTGGTCAAGCCTTCG |
| | | CAGACCCTGTCCCTC |
| | | ACTTGCGCCATTAGC |
| | | GGAGATTCGGTGTCG |
| | | TCGTCGTCAGCCGCC |
| | | TGGAACTGGATTAGA |
| | | CAGTCCCCTTCCCGA |
| | | GGGCTGGAGTGGCTG |
| | | GGCCACATCGGATAC |
| | | CGCAGCAAGTGGTAC |
| | | AACGAATACGCCGTC |
| | | AGCGTGAAGTCACGC |
| | | ATCACCATCAACCCG |
| | | GATACTAGCAAGAAC |
| | | CAGTTCAGCCTCCAG |
| | | TTGAACTCCGTGACC |
| | | CCGGAGGATACCGCC |
| | | GTGTACTACTGTGCG |
| | | CGGGGCATGTACGGA |
| | | TCCGTGCCGTACAAG |
| | | GAGGGATACTACTTC |
| | | GACATTTGGGGCCAG |
| | | GGGACTCTTGTCACC |
| | | GTGTCCTCGGCCTCC |
| | | ACTAAGGGCCCAAGT |
| | | GTGTTTCCCCTGGCC |
| | | CCCAGCAGCAAGTCT |
| | | ACTTCCGGCGGAACT |
| | | GCTGCCCTGGGTTGC |
| | | CTGGTGAAGGACTAC |
| | | TTCCCCGAGCCCGTG |
| | | ACAGTGTCCTGGAAC |
| | | TCTGGGGCTCTGACT |
| | | TCCGGCGTGCACACC |
| | | TTCCCCGCCGTGCTG |
| | | CAGAGCAGCGGCCTG |
| | | TACAGCCTGAGCAGC |
| | | GTGGTGACAGTGCCC |
| | | TCCAGCTCTCTGGGA |
| | | ACCCAGACCTATATC |
| | | TGCAACGTGAACCAC |
| | | AAGCCCAGCAACACC |
| | | AAGGTGGACAAGAGA |
| | | GTGGAGCCCAAGAGC |
| | | TGCGACAAGACCCAC |
| | | ACCTGCCCCCCCTGC |
| | | CCAGCTCCAGAACTG |
| | | CTGGGAGGGCCTTCC |
| | | GTGTTCCTGTTCCCC |
| | | CCCAAGCCCAAGGAC |
| | | ACCCTGATGATCAGC |
| | | AGGACCCCCGAGGTG |
| | | ACCTGCGTGGTGGTG |
| | | GACGTGTCCCACGAG |
| | | GACCCAGAGGTGAAG |
| | | TTCAACTGGTACGTG |
| | | GACGGCGTGGAGGTG |
| | | CACAACGCCAAGACC |
| | | AAGCCCAGAGAGGAG |
| | | CAGTACAACAGCACC |
| | | TACAGGGTGGTGTCC |
| | | GTGCTGACCGTGCTG |
| | | CACCAGGACTGGCTG |
| | | AACGGCAAAGAATAC |
| | | AAGTGCAAAGTCTCC |
| | | AACAAGGCCCTGCCA |
| | | GCCCCAATCGAAAAG |
| | | ACAATCAGCAAGGCC |
| | | AAGGGCCAGCCACGG |
| | | GAGCCCCAGGTGTAC |
| | | ACCCTGCCCCCCAGC |
| | | CGGGAGGAGATGACC |
| | | AAGAACCAGGTGTCC |
| | | CTGACCTGTCTGGTG |
| | | AAGGGCTTCTACCCC |
| | | AGCGATATCGCCGTG |
| | | GAGTGGGAGAGCAAC |
| | | GGCCAGCCCGAGAAC |
| | | AACTACAAGACCACC |
| | | CCCCCAGTGCTGGAC |
| | | AGCGACGGCAGCTTC |
| | | TTCCTGTACAGCAAG |
| | | CTGACCGTGGACAAG |
| | | TCCAGGTGGCAGCAG |
| | | GGCAACGTGTTCAGC |
| | | TGCAGCGTGATGCAC |
| | | GAGGCCCTGCACAAC |
| | | CACTACACCCAGAAG |
| | | TCCCTGAGCCTGAGC |
| | | CCCGGCAAG |
| SEQ ID NO: | LCDR1 | RASQGISSDLN |
| 2636 | (Combined) | |
| SEQ ID NO: | LCDR2 | AASNLQS |
| 2637 | (Combined) | |
| SEQ ID NO: | LCDR3 | QQYTDESMT |
| 2638 | (Combined) | |
| SEQ ID NO: | LCDR1 (Kabat) | RASQGISSDLN |
| 2636 | | |
| SEQ ID NO: | LCDR2 (Kabat) | AASNLQS |
| 2637 | | |
| SEQ ID NO: | LCDR3 (Kabat) | QQYTDESMT |
| 2638 | | |
| SEQ ID NO: | LCDR1 | SQGISSD |
| 2639 | (Chothia) | |
| SEQ ID NO: | LCDR2 | AAS |
| 2640 | (Chothia) | |
| SEQ ID NO: | LCDR3 | YTDESM |
| 2641 | (Chothia) | |
| SEQ ID NO: | LCDR1 (IMGT) | QGISSD |
| 2642 | | |
| SEQ ID NO: | LCDR2 (IMGT) | AAS |
| 2640 | | |
| SEQ ID NO: | LCDR3 (IMGT) | QQYTDESMT |
| 2638 | | |
| SEQ ID NO: | VL | DIQMTQSPSSLSASV |
| 2643 | | GDRVTITCRASQGIS |
| | | SDLNWYQQKPGKAPK |
| | | LLIYAASNLQSGVPS |
| | | RFSGSGSGTDFTLTI |
| | | SSLQPEDFATYYCQQ |
| | | YTDESMTFGQGTKVE |
| | | IK |
| SEQ ID NO: | DNA VL | GACATTCAGATGACC |
| 2650 | | CAGTCCCCGTCGTCC |
| | | CTGTCCGCATCCGTG |
| | | GGCGACAGAGTCACC |
| | | ATCACTTGCCGGGCC |
| | | TCACAGGGAATTTCC |
| | | TCCGACCTGAACTGG |
| | | TATCAGCAGAAGCCT |
| | | GGAAAGGCCCCGAAG |
| | | CTGCTGATCTACGCC |
| | | GCGTCCAACTTGCAA |
| | | TCGGGAGTGCCAAGC |
| | | CGCTTTTCTGGTTCC |
| | | GGGAGCGGGACTGAC |
| | | TTCACCCTGACTATT |
| | | AGCAGCCTGCAGCCC |
| | | GAAGATTTCGCTACC |
| | | TACTACTGCCAACAG |
| | | TACACAGATGAATCC |
| | | ATGACCTTCGGACAG |
| | | GGCACCAAAGTCGAG |
| | | ATCAAG |
| SEQ ID NO: | Light Chain | DIQMTQSPSSLSASV |
| 2645 | | GDRVTITCRASQGIS |
| | | SDLNWYQQKPGKAPK |
| | | LLIYAASNLQSGVPS |
| | | RFSGSGSGTDFTLTI |
| | | SSLQPEDFATYYCQQ |
| | | YTDESMTFGQGTKVE |
| | | IKRTVAAPSVFIFPP |
| | | SDEQLKSGTASVVCL |
| | | LNNFYPREAKVQWKV |
| | | DNALQSGNSQESVTE |
| | | QDSKDSTYSLSSTLT |
| | | LSKADYEKHKVYACE |
| | | VTHQGLSSPVTKSFN |
| | | RGEC |
| SEQ ID NO: | DNA Light | GACATTCAGATGACC |
| 2651 | Chain | CAGTCCCCGTCGTCC |
| | | CTGTCCGCATCCGTG |
| | | GGCGACAGAGTCACC |
| | | ATCACTTGCCGGGCC |
| | | TCACAGGGAATTTCC |
| | | TCCGACCTGAACTGG |
| | | TATCAGCAGAAGCCT |
| | | GGAAAGGCCCCGAAG |
| | | CTGCTGATCTACGCC |
| | | GCGTCCAACTTGCAA |
| | | TCGGGAGTGCCAAGC |
| | | CGCTTTTCTGGTTCC |
| | | GGGAGCGGGACTGAC |
| | | TTCACCCTGACTATT |
| | | AGCAGCCTGCAGCCC |
| | | GAAGATTTCGCTACC |
| | | TACTACTGCCAACAG |
| | | TACACAGATGAATCC |
| | | ATGACCTTCGGACAG |
| | | GGCACCAAAGTCGAG |
| | | ATCAAGCGTACGGTG |
| | | GCCGCTCCCAGCGTG |
| | | TTCATCTTCCCCCCC |
| | | AGCGACGAGCAGCTG |
| | | AAGAGCGGCACCGCC |
| | | AGCGTGGTGTGCCTG |
| | | CTGAACAACTTCTAC |
| | | CCCCGGGAGGCCAAG |
| | | GTGCAGTGGAAGGTG |
| | | GACAACGCCCTGCAG |
| | | AGCGGCAACAGCCAG |
| | | GAGAGCGTCACCGAG |
| | | CAGGACAGCAAGGAC |
| | | TCCACCTACAGCCTG |
| | | AGCAGCACCCTGACC |
| | | CTGAGCAAGGCCGAC |
| | | TACGAGAAGCATAAG |
| | | GTGTACGCCTGCGAG |
| | | GTGACCCACCAGGGC |
| | | CTGTCCAGCCCCGTG |
| | | ACCAAGAGCTTCAAC |
| | | AGGGGCGAGTGC |

MOR44746C

| | | |
|---|---|---|
| SEQ ID NO: | HCDR1 | GDSVSSSSAAWN |
| 2623 | (Combined) | |
| SEQ ID NO: | HCDR2 | HIGYRSKWYNEYAVS |
| 2624 | (Combined) | VKS |
| SEQ ID NO: | HCDR3 | GMYGSVPYKEGYYFD |
| 2625 | (Combined) | I |
| SEQ ID NO: | HCDR1 (Kabat) | SSSAAWN |
| 2626 | | |
| SEQ ID NO: | HCDR2 (Kabat) | HIGYRSKWYNEYAVS |
| 2624 | | VKS |
| SEQ ID NO: | HCDR3 (Kabat) | GMYGSVPYKEGYYFD |
| 2625 | | I |
| SEQ ID NO: | HCDR1 | GDSVSSSSA |
| 2627 | (Chothia) | |
| SEQ ID NO: | HCDR2 | GYRSKWY |
| 2628 | (Chothia) | |
| SEQ ID NO: | HCDR3 | GMYGSVPYKEGYYFD |
| 2625 | (Chothia) | I |
| SEQ ID NO: | HCDR1 (IMGT) | GDSVSSSSAA |
| 2629 | | |
| SEQ ID NO: | HCDR2 (IMGT) | IGYRSKWYN |
| 2630 | | |
| SEQ ID NO: | HCDR3 (IMGT) | ARGMYGSVPYKEGYY |
| 2631 | | FDI |
| SEQ ID NO: | VH | QVQLQQSGPGLVKPS |
| 2632 | | QTLSLTCAISGDSVS |
| | | SSSAAWNWIRQSPSR |
| | | GLEWLGHIGYRSKWY |
| | | NEYAVSVKSRITINP |
| | | DTSKNQFSLQLNSVT |
| | | PEDTAVYYCARGMYG |
| | | SVPYKEGYYFDIWGQ |
| | | GTLVTVSS |
| SEQ ID NO: | DNA VH | CAAGTGCAACTCCAG |
| 2647 | | CAGTCAGGACCGGGG |
| | | TTGGTCAAGCCTTCG |
| | | CAGACCCTGTCCCTC |
| | | ACTTGCGCCATTAGC |
| | | GGAGATTCGGTGTCG |
| | | TCGTCGTCAGCCGCC |
| | | TGGAACTGGATTAGA |
| | | CAGTCCCCTTCCCGA |
| | | GGGCTGGAGTGGCTG |
| | | GGCCACATCGGATAC |
| | | CGCAGCAAGTGGTAC |
| | | AACGAATACGCCGTC |
| | | AGCGTGAAGTCACGC |
| | | ATCACCATCAACCCG |
| | | GATACTAGCAAGAAC |
| | | CAGTTCAGCCTCCAG |
| | | TTGAACTCCGTGACC |
| | | CCGGAGGATACCGCC |
| | | GTGTACTACTGTGCG |
| | | CGGGGCATGTACGGA |
| | | TCCGTGCCGTACAAG |
| | | GAGGGATACTACTTC |
| | | GACATTTGGGGCCAG |
| | | GGGACTCTTGTCACC |
| | | GTGTCCTCG |
| SEQ ID NO: | Heavy Chain | QVQLQQSGPGLVKPS |
| 2652 | | QTLSLTCAISGDSVS |
| | | SSSAAWNWIRQSPSR |
| | | GLEWLGHIGYRSKWY |
| | | NEYAVSVKSRITINP |
| | | DTSKNQFSLQLNSVT |
| | | PEDTAVYYCARGMYG |
| | | SVPYKEGYYFDIWGQ |
| | | GTLVTVSSASTKGPS |
| | | VFPLAPSSKSTSGGT |
| | | AALGCLVKDYFPEPV |
| | | TVSWNSGALTSGVHT |
| | | FPAVLQSSGLYSLSS |
| | | VVTVPSSSLGTQTYI |
| | | CNVNHKPSNTKVDKR |
| | | VEPKSCDKTHTCPPC |
| | | PAPELLGGPSVFLFP |
| | | PKPKDTLMISRTPEV |
| | | TCVVVAVSHEDPEVK |
| | | FNWYVDGVEVHNAKT |
| | | KPREEQYNSTYRVVS |
| | | VLTVLHQDWLNGKEY |
| | | KCKVSNKALAAPIEK |
| | | TISKAKGQPREPQVY |
| | | TLPPSREEMTKNQVS |
| | | LTCLVKGFYPSDIAV |
| | | EWESNGQPENNYKTT |
| | | PPVLDSDGSFFLYSK |
| | | LTVDKSRWQQGNVFS |
| | | CSVMHEALHNHYTQK |
| | | SLSLSPGK |
| SEQ ID NO: | DNA Heavy | CAAGTGCAACTCCAG |
| 2653 | Chain | CAGTCAGGACCGGGG |
| | | TTGGTCAAGCCTTCG |
| | | CAGACCCTGTCCCTC |
| | | ACTTGCGCCATTAGC |
| | | GGAGATTCGGTGTCG |
| | | TCGTCGTCAGCCGCC |
| | | TGGAACTGGATTAGA |
| | | CAGTCCCCTTCCCGA |
| | | GGGCTGGAGTGGCTG |
| | | GGCCACATCGGATAC |
| | | CGCAGCAAGTGGTAC |
| | | AACGAATACGCCGTC |
| | | AGCGTGAAGTCACGC |
| | | ATCACCATCAACCCG |
| | | GATACTAGCAAGAAC |
| | | CAGTTCAGCCTCCAG |
| | | TTGAACTCCGTGACC |
| | | CCGGAGGATACCGCC |
| | | GTGTACTACTGTGCG |
| | | CGGGGCATGTACGGA |
| | | TCCGTGCCGTACAAG |
| | | GAGGGATACTACTTC |
| | | GACATTTGGGGCCAG |
| | | GGGACTCTTGTCACC |
| | | GTGTCCTCGGCCTCC |
| | | ACTAAGGGCCCGTCA |
| | | GTGTTCCCCCTTGCG |
| | | CCATCCTCGAAGTCA |
| | | ACCTCCGGAGGAACT |
| | | GCCGCACTGGGTTGC |
| | | CTCGTGAAAGACTAT |
| | | TTCCCGGAACCCGTC |
| | | ACTGTCTCCTGGAAC |
| | | TCAGGAGCGCTCACC |
| | | AGCGGAGTGCATACC |
| | | TTTCCTGCGGTGCTG |
| | | CAGTCCAGCGGCCTG |
| | | TACTCCCTGAGCTCC |
| | | GTCGTGACCGTCCCC |
| | | TCGTCGTCCCTGGGA |
| | | ACCCAAACCTACATT |
| | | TGCAACGTCAATCAC |
| | | AAGCCAAGCAACACT |
| | | AAGGTGGACAAGAGA |
| | | GTGGAGCCCAAGTCC |
| | | TGCGATAAGACCCAC |
| | | ACCTGTCCTCCCTGT |
| | | CCGGCACCTGAACTG |
| | | CTTGGTGGACCTTCC |
| | | GTGTTCCTGTTCCCG |
| | | CCCAAGCCAAAAGAC |
| | | ACCCTGATGATCTCC |
| | | CGCACTCCGGAAGTC |
| | | ACTTGCGTGGTCGTG |
| | | GCCGTGTCCCACGAG |
| | | GACCCCGAGGTCAAG |
| | | TTTAATTGGTACGTG |
| | | GACGGAGTGGAAGTG |
| | | CACAACGCCAAGACC |
| | | AAGCCGCGGGAAGAA |
| | | CAGTACAACTCCACC |
| | | TACCGCGTGGTGTCC |
| | | GTCCTGACTGTGCTC |
| | | CACCAGGACTGGCTG |
| | | AACGGAAAGGAGTAC |
| | | AAGTGCAAAGTGTCC |
| | | AACAAGGCACTGGCT |
| | | GCCCCTATCGAAAAG |
| | | ACTATCTCCAAGGCC |
| | | AAGGGCCAACCTAGG |
| | | GAGCCCCAGGTGTAC |
| | | ACGTTGCCTCCTTCC |
| | | CGCGAAGAAATGACT |
| | | AAGAACCAGGTGTCG |
| | | CTGACCTGTCTCGTG |
| | | AAAGGGTTCTACCCC |
| | | TCTGACATCGCCGTG |
| | | GAATGGGAGTCAAAC |
| | | GGACAGCCTGAGAAC |
| | | AACTATAAGACCACA |
| | | CCACCTGTCCTGGAC |
| | | TCCGACGGCTCCTTC |
| | | TTCCTGTACTCAAAG |
| | | TTGACCGTGGACAAG |
| | | TCGCGGTGGCAACAG |
| | | GGCAACGTGTTCTCT |
| | | TGCTCCGTGATGCAC |
| | | GAAGCCCTGCACAAC |
| | | CACTACACCCAAAAG |
| | | TCGCTCAGCCTCTCC |
| | | CCCGGAAAG |
| SEQ ID NO: | LCDR1 | RASQGISSDLN |
| 2636 | (Combined) | |
| SEQ ID NO: | LCDR2 | AASNLQS |
| 2637 | (Combined) | |
| SEQ ID NO: | LCDR3 | QQYTDESMT |
| 2638 | (Combined) | |
| SEQ ID NO: | LCDR1 (Kabat) | RASQGISSDLN |
| 2636 | | |
| SEQ ID NO: | LCDR2 (Kabat) | AASNLQS |
| 2637 | | |
| SEQ ID NO: | LCDR3 (Kabat) | QQYTDESMT |
| 2638 | | |
| SEQ ID NO: | LCDR1 | SQGISSD |
| 2639 | (Chothia) | |
| SEQ ID NO: | LCDR2 | AAS |
| 2640 | (Chothia) | |
| SEQ ID NO: | LCDR3 | YTDESM |
| 2641 | (Chothia) | |
| SEQ ID NO: | LCDR1 (IMGT) | QGISSD |
| 2642 | | |
| SEQ ID NO: | LCDR2 (IMGT) | AAS |
| 2640 | | |
| SEQ ID NO: | LCDR3 (IMGT) | QQYTDESMT |
| 2638 | | |
| SEQ ID NO: | VL | DIQMTQSPSSLSASV |
| 2643 | | GDRVTITCRASQGIS |
| | | SDLNWYQQKPGKAPK |
| | | LLIYAASNLQSGVPS |
| | | RFSGSGSGTDFTLTI |
| | | SSLQPEDFATYYCQQ |
| | | YTDESMTFGQGTKVE |
| | | IK |
| SEQ ID NO: | DNA VL | GACATTCAGATGACC |
| 2650 | | CAGTCCCCGTCGTCC |
| | | CTGTCCGCATCCGTG |
| | | GGCGACAGAGTCACC |
| | | ATCACTTGCCGGGCC |
| | | TCACAGGGAATTTCC |
| | | TCCGACCTGAACTGG |
| | | TATCAGCAGAAGCCT |
| | | GGAAAGGCCCCGAAG |
| | | CTGCTGATCTACGCC |
| | | GCGTCCAACTTGCAA |
| | | TCGGGAGTGCCAAGC |
| | | CGCTTTTCTGGTTCC |
| | | GGGAGCGGGACTGAC |
| | | TTCACCCTGACTATT |
| | | AGCAGCCTGCAGCCC |
| | | GAAGATTTCGCTACC |
| | | TACTACTGCCAACAG |
| | | TACACAGATGAATCC |
| | | ATGACCTTCGGACAG |
| | | GGCACCAAAGTCGAG |
| | | ATCAAG |
| SEQ ID NO: | Light Chain | DIQMTQSPSSLSASV |
| 2645 | | GDRVTITCRASQGIS |
| | | SDLNWYQQKPGKAPK |
| | | LLIYAASNLQSGVPS |
| | | RFSGSGSGTDFTLTI |
| | | SSLQPEDFATYYCQQ |
| | | YTDESMTFGQGTKVE |
| | | IKRTVAAPSVFIFPP |
| | | SDEQLKSGTASVVCL |
| | | LNNFYPREAKVQWKV |
| | | DNALQSGNSQESVTE |
| | | QDSKDSTYSLSSTLT |
| | | LSKADYEKHKVYACE |
| | | VTHQGLSSPVTKSFN |
| | | RGEC |
| SEQ ID NO: | DNA Light | GACATTCAGATGACC |
| 2651 | Chain | CAGTCCCCGTCGTCC |
| | | CTGTCCGCATCCGTG |
| | | GGCGACAGAGTCACC |
| | | ATCACTTGCCGGGCC |
| | | TCACAGGGAATTTCC |
| | | TCCGACCTGAACTGG |
| | | TATCAGCAGAAGCCT |
| | | GGAAAGGCCCCGAAG |
| | | CTGCTGATCTACGCC |
| | | GCGTCCAACTTGCAA |
| | | TCGGGAGTGCCAAGC |
| | | CGCTTTTCTGGTTCC |
| | | GGGAGCGGGACTGAC |
| | | TTCACCCTGACTATT |
| | | AGCAGCCTGCAGCCC |
| | | GAAGATTTCGCTACC |
| | | TACTACTGCCAACAG |
| | | TACACAGATGAATCC |
| | | ATGACCTTCGGACAG |
| | | GGCACCAAAGTCGAG |
| | | ATCAAGCGTACGGTG |
| | | GCCGCTCCCAGCGTG |
| | | TTCATCTTCCCCCCC |
| | | AGCGACGAGCAGCTG |
| | | AAGAGCGGCACCGCC |
| | | AGCGTGGTGTGCCTG |
| | | CTGAACAACTTCTAC |
| | | CCCCGGGAGGCCAAG |
| | | GTGCAGTGGAAGGTG |
| | | GACAACGCCCTGCAG |
| | | AGCGGCAACAGCCAG |
| | | GAGAGCGTCACCGAG |
| | | CAGGACAGCAAGGAC |
| | | TCCACCTACAGCCTG |
| | | AGCAGCACCCTGACC |
| | | CTGAGCAAGGCCGAC |
| | | TACGAGAAGCATAAG |
| | | GTGTACGCCTGCGAG |
| | | GTGACCCACCAGGGC |
| | | CTGTCCAGCCCCGTG |
| | | ACCAAGAGCTTCAAC |
| | | AGGGGCGAGTGC |

MOR44746D

| | | |
|---|---|---|
| SEQ ID NO: | HCDR1 | GDSVSSSSAAWN |
| 2623 | (Combined) | |
| SEQ ID NO: | HCDR2 | HIGYRSKWYNEYAVS |
| 2624 | (Combined) | VKS |
| SEQ ID NO: | HCDR3 | GMYGSVPYKEGYYFD |
| 2625 | (Combined) | I |
| SEQ ID NO: | HCDR1 (Kabat) | SSSAAWN |
| 2626 | | |
| SEQ ID NO: | HCDR2 (Kabat) | HIGYRSKWYNEYAVS |
| 2624 | | VKS |
| SEQ ID NO: | HCDR3 (Kabat) | GMYGSVPYKEGYYFD |
| 2625 | | I |
| SEQ ID NO: | HCDR1 | GDSVSSSSA |
| 2627 | (Chothia) | |
| SEQ ID NO: | HCDR2 | GYRSKWY |
| 2628 | (Chothia) | |
| SEQ ID NO: | HCDR3 | GMYGSVPYKEGYYFD |
| 2625 | (Chothia) | I |
| SEQ ID NO: | HCDR1 (IMGT) | GDSVSSSSAA |
| 2629 | | |
| SEQ ID NO: | HCDR2 (IMGT) | IGYRSKWYN |
| 2630 | | |
| SEQ ID NO: | HCDR3 (IMGT) | ARGMYGSVPYKEGYY |
| 2631 | | FDI |
| SEQ ID NO: | VH | QVQLQQSGPGLVKPS |
| 2632 | | QTLSLTCAISGDSVS |
| | | SSSAAWNWIRQSPSR |
| | | GLEWLGHIGYRSKWY |
| | | NEYAVSVKSRITINP |
| | | DTSKNQFSLQLNSVT |
| | | PEDTAVYYCARGMYG |
| | | SVPYKEGYYFDIWGQ |
| | | GTLVTVSS |
| SEQ ID NO: | DNA VH | CAAGTGCAACTCCAG |
| 2647 | | CAGTCAGGACCGGGG |
| | | TTGGTCAAGCCTTCG |
| | | CAGACCCTGTCCCTC |
| | | ACTTGCGCCATTAGC |
| | | GGAGATTCGGTGTCG |
| | | TCGTCGTCAGCCGCC |
| | | TGGAACTGGATTAGA |
| | | CAGTCCCCTTCCCGA |
| | | GGGCTGGAGTGGCTG |
| | | GGCCACATCGGATAC |
| | | CGCAGCAAGTGGTAC |
| | | AACGAATACGCCGTC |
| | | AGCGTGAAGTCACGC |
| | | ATCACCATCAACCCG |
| | | GATACTAGCAAGAAC |
| | | CAGTTCAGCCTCCAG |
| | | TTGAACTCCGTGACC |
| | | CCGGAGGATACCGCC |
| | | GTGTACTACTGTGCG |
| | | CGGGGCATGTACGGA |
| | | TCCGTGCCGTACAAG |
| | | GAGGGATACTACTTC |
| | | GACATTTGGGGCCAG |
| | | GGGACTCTTGTCACC |
| | | GTGTCCTCG |
| SEQ ID NO: | Heavy Chain | QVQLQQSGPGLVKPS |
| 2654 | | QTLSLTCAISGDSVS |
| | | SSSAAWNWIRQSPSR |
| | | GLEWLGHIGYRSKWY |
| | | NEYAVSVKSRITINP |
| | | DTSKNQFSLQLNSVT |
| | | PEDTAVYYCARGMYG |
| | | SVPYKEGYYFDIWGQ |
| | | GTLVTVSSASTKGPS |
| | | VFPLAPSSKSTSGGT |
| | | AALGCLVKDYFPEPV |
| | | TVSWNSGALTSGVHT |
| | | FPAVLQSSGLYSLSS |
| | | VVTVPSSSLGTQTYI |
| | | CNVNHKPSNTKVDKR |
| | | VEPKSCDKTHTCPPC |
| | | PAPELLGGPSVFLFP |
| | | PKPKDTLMISRTPEV |
| | | TCVVVDVSHEDPEVK |
| | | FNWYVDGVEVHNAKT |
| | | KPREEQYNSTYRVVS |
| | | VLTVLHQDWLNGKEY |
| | | KCKVSNKALPAPIEK |
| | | TISKAKGQPREPQVY |
| | | TLPPSREEMTKNQVS |
| | | LTCLVKGFYPSDIAV |
| | | EWESNGQPENNYKTT |
| | | PPVLDSDGSFFLYSK |
| | | LTVDKSRWQQGNVFS |
| | | CSVLHEALHSHYTQK |
| | | SLSLSPGK |
| SEQ ID NO: | DNA Heavy | CAAGTGCAACTCCAG |
| 2655 | Chain | CAGTCAGGACCGGGG |
| | | TTGGTCAAGCCTTCG |
| | | CAGACCCTGTCCCTC |
| | | ACTTGCGCCATTAGC |
| | | GGAGATTCGGTGTCG |
| | | TCGTCGTCAGCCGCC |
| | | TGGAACTGGATTAGA |
| | | CAGTCCCCTTCCCGA |
| | | GGGCTGGAGTGGCTG |
| | | GGCCACATCGGATAC |
| | | CGCAGCAAGTGGTAC |
| | | AACGAATACGCCGTC |
| | | AGCGTGAAGTCACGC |
| | | ATCACCATCAACCCG |
| | | GATACTAGCAAGAAC |
| | | CAGTTCAGCCTCCAG |
| | | TTGAACTCCGTGACC |
| | | CCGGAGGATACCGCC |
| | | GTGTACTACTGTGCG |
| | | CGGGGCATGTACGGA |
| | | TCCGTGCCGTACAAG |
| | | GAGGGATACTACTTC |
| | | GACATTTGGGGCCAG |
| | | GGGACTCTTGTCACC |
| | | GTGTCCTCGGCCTCC |
| | | ACTAAGGGCCCGTCA |
| | | GTGTTCCCCCTTGCG |
| | | CCATCCTCGAAGTCA |
| | | ACCTCCGGAGGAACT |
| | | GCCGCACTGGGTTGC |
| | | CTCGTGAAAGACTAT |
| | | TTCCCGGAACCCGTC |
| | | ACTGTCTCCTGGAAC |
| | | TCAGGAGCGCTCACC |
| | | AGCGGAGTGCATACC |
| | | TTTCCTGCGGTGCTG |
| | | CAGTCCAGCGGCCTG |
| | | TACTCCCTGAGCTCC |
| | | GTCGTGACCGTCCCC |
| | | TCGTCGTCCCTGGGA |
| | | ACCCAAACCTACATT |
| | | TGCAACGTCAATCAC |
| | | AAGCCAAGCAACACT |
| | | AAGGTGGACAAGAGA |
| | | GTGGAGCCCAAGTCC |
| | | TGCGATAAGACCCAC |
| | | ACCTGTCCTCCCTGT |
| | | CCGGCACCTGAACTG |
| | | CTTGGTGGACCTTCC |
| | | GTGTTCCTGTTCCCG |
| | | CCCAAGCCAAAAGAC |
| | | ACCCTGATGATCTCC |
| | | CGCACTCCGGAAGTC |
| | | ACTTGCGTGGTCGTG |
| | | GACGTGTCCCACGAG |
| | | GACCCCGAGGTCAAG |
| | | TTTAATTGGTACGTG |
| | | GACGGAGTGGAAGTG |
| | | CACAACGCCAAGACC |
| | | AAGCCGCGGGAAGAA |
| | | CAGTACAACTCCACC |
| | | TACCGCGTGGTGTCC |
| | | GTCCTGACTGTGCTC |
| | | CACCAGGACTGGCTG |
| | | AACGGAAAGGAGTAC |
| | | AAGTGCAAAGTGTCC |
| | | AACAAGGCACTGCCA |
| | | GCCCCTATCGAAAAG |
| | | ACTATCTCCAAGGCC |
| | | AAGGGCCAACCTAGG |
| | | GAGCCCCAGGTGTAC |
| | | ACGTTGCCTCCTTCC |
| | | CGCGAAGAAATGACT |
| | | AAGAACCAGGTGTCG |
| | | CTGACCTGTCTCGTG |
| | | AAAGGGTTCTACCCC |
| | | TCTGACATCGCCGTG |
| | | GAATGGGAGTCAAAC |
| | | GGACAGCCTGAGAAC |
| | | AACTATAAGACCACA |
| | | CCACCTGTCCTGGAC |
| | | TCCGACGGCTCCTTC |
| | | TTCCTGTACTCAAAG |
| | | TTGACCGTGGACAAG |
| | | TCGCGGTGGCAACAG |
| | | GGCAACGTGTTCTCT |
| | | TGCTCCGTGCTGCAC |
| | | GAAGCCCTGCACAGC |
| | | CACTACACCCAAAAG |
| | | TCGCTCAGCCTCTCC |
| | | CCCGGAAAG |
| SEQ ID NO: | LCDR1 | RASQGISSDLN |
| 2636 | (Combined) | |
| SEQ ID NO: | LCDR2 | AASNLQS |
| 2637 | (Combined) | |
| SEQ ID NO: | LCDR3 | QQYTDESMT |
| 2638 | (Combined) | |
| SEQ ID NO: | LCDR1 (Kabat) | RASQGISSDLN |
| 2636 | | |
| SEQ ID NO: | LCDR2 (Kabat) | AASNLQS |
| 2637 | | |
| SEQ ID NO: | LCDR3 (Kabat) | QQYTDESMT |
| 2638 | | |
| SEQ ID NO: | LCDR1 | SQGISSD |
| 2639 | (Chothia) | |
| SEQ ID NO: | LCDR2 | AAS |
| 2640 | (Chothia) | |
| SEQ ID NO: | LCDR3 | YTDESM |
| 2641 | (Chothia) | |
| SEQ ID NO: | LCDR1 (IMGT) | QGISSD |
| 2642 | | |
| SEQ ID NO: | LCDR2 (IMGT) | AAS |
| 2640 | | |
| SEQ ID NO: | LCDR3 (IMGT) | QQYTDESMT |
| 2638 | | |
| SEQ ID NO: | VL | DIQMTQSPSSLSASV |
| 2643 | | GDRVTITCRASQGIS |
| | | SDLNWYQQKPGKAPK |
| | | LLIYAASNLQSGVPS |
| | | RFSGSGSGTDFTLTI |
| | | SSLQPEDFATYYCQQ |
| | | YTDESMTFGQGTKVE |
| | | IK |
| SEQ ID NO: | DNA VL | GACATTCAGATGACC |
| 2650 | | CAGTCCCCGTCGTCC |
| | | CTGTCCGCATCCGTG |
| | | GGCGACAGAGTCACC |
| | | ATCACTTGCCGGGCC |
| | | TCACAGGGAATTTCC |
| | | TCCGACCTGAACTGG |
| | | TATCAGCAGAAGCCT |
| | | GGAAAGGCCCCGAAG |
| | | CTGCTGATCTACGCC |
| | | GCGTCCAACTTGCAA |
| | | TCGGGAGTGCCAAGC |
| | | CGCTTTTCTGGTTCC |
| | | GGGAGCGGGACTGAC |
| | | TTCACCCTGACTATT |
| | | AGCAGCCTGCAGCCC |
| | | GAAGATTTCGCTACC |
| | | TACTACTGCCAACAG |
| | | TACACAGATGAATCC |
| | | ATGACCTTCGGACAG |
| | | GGCACCAAAGTCGAG |
| | | ATCAAG |
| SEQ ID NO: | Light Chain | DIQMTQSPSSLSASV |
| 2645 | | GDRVTITCRASQGIS |
| | | SDLNWYQQKPGKAPK |
| | | LLIYAASNLQSGVPS |
| | | RFSGSGSGTDFTLTI |
| | | SSLQPEDFATYYCQQ |
| | | YTDESMTFGQGTKVE |
| | | IKRTVAAPSVFIFPP |
| | | SDEQLKSGTASVVCL |
| | | LNNFYPREAKVQWKV |
| | | DNALQSGNSQESVTE |
| | | QDSKDSTYSLSSTLT |
| | | LSKADYEKHKVYACE |
| | | VTHQGLSSPVTKSFN |
| | | RGEC |
| SEQ ID NO: | DNA Light | GACATTCAGATGACC |
| 2651 | Chain | CAGTCCCCGTCGTCC |
| | | CTGTCCGCATCCGTG |
| | | GGCGACAGAGTCACC |
| | | ATCACTTGCCGGGCC |
| | | TCACAGGGAATTTCC |
| | | TCCGACCTGAACTGG |
| | | TATCAGCAGAAGCCT |
| | | GGAAAGGCCCCGAAG |
| | | CTGCTGATCTACGCC |
| | | GCGTCCAACTTGCAA |
| | | TCGGGAGTGCCAAGC |
| | | CGCTTTTCTGGTTCC |
| | | GGGAGCGGGACTGAC |
| | | TTCACCCTGACTATT |
| | | AGCAGCCTGCAGCCC |
| | | GAAGATTTCGCTACC |
| | | TACTACTGCCAACAG |
| | | TACACAGATGAATCC |
| | | ATGACCTTCGGACAG |
| | | GGCACCAAAGTCGAG |
| | | ATCAAGCGTACGGTG |
| | | GCCGCTCCCAGCGTG |
| | | TTCATCTTCCCCCCC |
| | | AGCGACGAGCAGCTG |
| | | AAGAGCGGCACCGCC |
| | | AGCGTGGTGTGCCTG |
| | | CTGAACAACTTCTAC |
| | | CCCCGGGAGGCCAAG |
| | | GTGCAGTGGAAGGTG |
| | | GACAACGCCCTGCAG |
| | | AGCGGCAACAGCCAG |
| | | GAGAGCGTCACCGAG |
| | | CAGGACAGCAAGGAC |
| | | TCCACCTACAGCCTG |
| | | AGCAGCACCCTGACC |
| | | CTGAGCAAGGCCGAC |
| | | TACGAGAAGCATAAG |
| | | GTGTACGCCTGCGAG |
| | | GTGACCCACCAGGGC |
| | | CTGTCCAGCCCCGTG |
| | | ACCAAGAGCTTCAAC |
| | | AGGGGCGAGTGC |

MOR44746E

| | | |
|---|---|---|
| SEQ ID NO: | HCDR1 | GDSVSSSSAAWN |
| 2623 | (Combined) | |
| SEQ ID NO: | HCDR2 | HIGYRSKWYNEYAVS |
| 2624 | (Combined) | VKS |
| SEQ ID NO: | HCDR3 | GMYGSVPYKEGYYFD |
| 2625 | (Combined) | I |
| SEQ ID NO: | HCDR1 (Kabat) | SSSAAWN |
| 2626 | | |
| SEQ ID NO: | HCDR2 (Kabat) | HIGYRSKWYNEYAVS |
| 2624 | | VKS |
| SEQ ID NO: | HCDR3 (Kabat) | GMYGSVPYKEGYYFD |
| 2625 | | I |
| SEQ ID NO: | HCDR1 | GDSVSSSSA |
| 2627 | (Chothia) | |
| SEQ ID NO: | HCDR2 | GYRSKWY |
| 2628 | (Chothia) | |
| SEQ ID NO: | HCDR3 | GMYGSVPYKEGYYFD |
| 2625 | (Chothia) | I |
| SEQ ID NO: | HCDR1 (IMGT) | GDSVSSSSAA |
| 2629 | | |
| SEQ ID NO: | HCDR2 (IMGT) | IGYRSKWYN |
| 2630 | | |
| SEQ ID NO: | HCDR3 (IMGT) | ARGMYGSVPYKEGYY |
| 2631 | | FDI |
| SEQ ID NO: | VH | QVQLQQSGPGLVKPS |
| 2632 | | QTLSLTCAISGDSVS |
| | | SSSAAWNWIRQSPSR |
| | | GLEWLGHIGYRSKWY |
| | | NEYAVSVKSRITINP |
| | | DTSKNQFSLQLNSVT |
| | | PEDTAVYYCARGMYG |
| | | SVPYKEGYYFDIWGQ |
| | | GTLVTVSS |
| SEQ ID NO: | DNA VH | CAAGTGCAACTCCAG |
| 2647 | | CAGTCAGGACCGGGG |
| | | TTGGTCAAGCCTTCG |
| | | CAGACCCTGTCCCTC |
| | | ACTTGCGCCATTAGC |
| | | GGAGATTCGGTGTCG |
| | | TCGTCGTCAGCCGCC |
| | | TGGAACTGGATTAGA |
| | | CAGTCCCCTTCCCGA |
| | | GGGCTGGAGTGGCTG |
| | | GGCCACATCGGATAC |
| | | CGCAGCAAGTGGTAC |
| | | AACGAATACGCCGTC |
| | | AGCGTGAAGTCACGC |
| | | ATCACCATCAACCCG |
| | | GATACTAGCAAGAAC |
| | | CAGTTCAGCCTCCAG |
| | | TTGAACTCCGTGACC |
| | | CCGGAGGATACCGCC |
| | | GTGTACTACTGTGCG |
| | | CGGGGCATGTACGGA |
| | | TCCGTGCCGTACAAG |
| | | GAGGGATACTACTTC |
| | | GACATTTGGGGCCAG |
| | | GGGACTCTTGTCACC |
| | | GTGTCCTCG |
| SEQ ID NO: | Heavy Chain | QVQLQQSGPGLVKPS |
| 2656 | | QTLSLTCAISGDSVS |
| | | SSSAAWNWIRQSPSR |
| | | GLEWLGHIGYRSKWY |
| | | NEYAVSVKSRITINP |
| | | DTSKNQFSLQLNSVT |
| | | PEDTAVYYCARGMYG |
| | | SVPYKEGYYFDIWGQ |
| | | GTLVTVSSASTKGPS |
| | | VFPLAPSSKSTSGGT |
| | | AALGCLVKDYFPEPV |
| | | TVSWNSGALTSGVHT |
| | | FPAVLQSSGLYSLSS |
| | | VVTVPSSSLGTQTYI |
| | | CNVNHKPSNTKVDKR |
| | | VEPKSCDKTHTCPPC |
| | | PAPELLGGPSVFLFP |
| | | PKPKDTLMISRTPEV |
| | | TCVVVAVSHEDPEVK |
| | | FNWYVDGVEVHNAKT |
| | | KPREEQYNSTYRVVS |
| | | VLTVLHQDWLNGKEY |
| | | KCKVSNKALAAPIEK |
| | | TISKAKGQPREPQVY |
| | | TLPPSREEMTKNQVS |
| | | LTCLVKGFYPSDIAV |
| | | EWESNGQPENNYKTT |
| | | PPVLDSDGSFFLYSK |
| | | LTVDKSRWQQGNVFS |
| | | CSVLHEALHSHYTQK |
| | | SLSLSPGK |
| SEQ ID NO: | DNA Heavy | CAAGTGCAACTCCAG |
| 2657 | Chain | CAGTCAGGACCGGGG |
| | | TTGGTCAAGCCTTCG |
| | | CAGACCCTGTCCCTC |
| | | ACTTGCGCCATTAGC |
| | | GGAGATTCGGTGTCG |
| | | TCGTCGTCAGCCGCC |
| | | TGGAACTGGATTAGA |
| | | CAGTCCCCTTCCCGA |
| | | GGGCTGGAGTGGCTG |
| | | GGCCACATCGGATAC |
| | | CGCAGCAAGTGGTAC |
| | | AACGAATACGCCGTC |
| | | AGCGTGAAGTCACGC |
| | | ATCACCATCAACCCG |
| | | GATACTAGCAAGAAC |
| | | CAGTTCAGCCTCCAG |
| | | TTGAACTCCGTGACC |
| | | CCGGAGGATACCGCC |
| | | GTGTACTACTGTGCG |
| | | CGGGGCATGTACGGA |
| | | TCCGTGCCGTACAAG |
| | | GAGGGATACTACTTC |
| | | GACATTTGGGGCCAG |
| | | GGGACTCTTGTCACC |
| | | GTGTCCTCGGCCTCC |
| | | ACTAAGGGCCCGTCA |
| | | GTGTTCCCCCTTGCG |
| | | CCATCCTCGAAGTCA |
| | | ACCTCCGGAGGAACT |
| | | GCCGCACTGGGTTGC |
| | | CTCGTGAAAGACTAT |
| | | TTCCCGGAACCCGTC |
| | | ACTGTCTCCTGGAAC |
| | | TCAGGAGCGCTCACC |
| | | AGCGGAGTGCATACC |
| | | TTTCCTGCGGTGCTG |
| | | CAGTCCAGCGGCCTG |
| | | TACTCCCTGAGCTCC |
| | | GTCGTGACCGTCCCC |
| | | TCGTCGTCCCTGGGA |
| | | ACCCAAACCTACATT |
| | | TGCAACGTCAATCAC |
| | | AAGCCAAGCAACACT |
| | | AAGGTGGACAAGAGA |
| | | GTGGAGCCCAAGTCC |
| | | TGCGATAAGACCCAC |
| | | ACCTGTCCTCCCTGT |
| | | CCGGCACCTGAACTG |
| | | CTTGGTGGACCTTCC |
| | | GTGTTCCTGTTCCCG |
| | | CCCAAGCCAAAAGAC |
| | | ACCCTGATGATCTCC |
| | | CGCACTCCGGAAGTC |
| | | ACTTGCGTGGTCGTG |
| | | GCCGTGTCCCACGAG |
| | | GACCCCGAGGTCAAG |
| | | TTTAATTGGTACGTG |
| | | GACGGAGTGGAAGTG |
| | | CACAACGCCAAGACC |
| | | AAGCCGCGGGAAGAA |
| | | CAGTACAACTCCACC |
| | | TACCGCGTGGTGTCC |
| | | GTCCTGACTGTGCTC |
| | | CACCAGGACTGGCTG |
| | | AACGGAAAGGAGTAC |
| | | AAGTGCAAAGTGTCC |
| | | AACAAGGCACTGGCT |
| | | GCCCCTATCGAAAAG |
| | | ACTATCTCCAAGGCC |
| | | AAGGGCCAACCTAGG |
| | | GAGCCCCAGGTGTAC |
| | | ACGTTGCCTCCTTCC |
| | | CGCGAAGAAATGACT |
| | | AAGAACCAGGTGTCG |
| | | CTGACCTGTCTCGTG |
| | | AAAGGGTTCTACCCC |
| | | TCTGACATCGCCGTG |
| | | GAATGGGAGTCAAAC |
| | | GGACAGCCTGAGAAC |
| | | AACTATAAGACCACA |
| | | CCACCTGTCCTGGAC |
| | | TCCGACGGCTCCTTC |
| | | TTCCTGTACTCAAAG |
| | | TTGACCGTGGACAAG |
| | | TCGCGGTGGCAACAG |
| | | GGCAACGTGTTCTCT |
| | | TGCTCCGTGCTGCAC |
| | | GAAGCCCTGCACAGC |
| | | CACTACACCCAAAAG |
| | | TCGCTCAGCCTCTCC |
| | | CCCGGAAAG |
| SEQ ID NO: | LCDR1 | RASQGISSDLN |
| 2636 | (Combined) | |
| SEQ ID NO: | LCDR2 | AASNLQS |
| 2637 | (Combined) | |
| SEQ ID NO: | LCDR3 | QQYTDESMT |
| 2638 | (Combined) | |
| SEQ ID NO: | LCDR1 (Kabat) | RASQGISSDLN |
| 2636 | | |
| SEQ ID NO: | LCDR2 (Kabat) | AASNLQS |
| 2637 | | |
| SEQ ID NO: | LCDR3 (Kabat) | QQYTDESMT |
| 2638 | | |
| SEQ ID NO: | LCDR1 | SQGISSD |
| 2639 | (Chothia) | |
| SEQ ID NO: | LCDR2 | AAS |
| 2640 | (Chothia) | |
| SEQ ID NO: | LCDR3 | YTDESM |
| 2641 | (Chothia) | |
| SEQ ID NO: | LCDR1 (IMGT) | QGISSD |
| 2642 | | |
| SEQ ID NO: | LCDR2 (IMGT) | AAS |
| 2640 | | |
| SEQ ID NO: | LCDR3 (IMGT) | QQYTDESMT |
| 2638 | | |
| SEQ ID NO: | VL | DIQMTQSPSSLSASV |
| 2643 | | GDRVTITCRASQGIS |
| | | SDLNWYQQKPGKAPK |
| | | LLIYAASNLQSGVPS |
| | | RFSGSGSGTDFTLTI |
| | | SSLQPEDFATYYCQQ |
| | | YTDESMTFGQGTKVE |
| | | IK |
| SEQ ID NO: | DNA VL | GACATTCAGATGACC |
| 2650 | | CAGTCCCCGTCGTCC |
| | | CTGTCCGCATCCGTG |
| | | GGCGACAGAGTCACC |
| | | ATCACTTGCCGGGCC |
| | | TCACAGGGAATTTCC |
| | | TCCGACCTGAACTGG |
| | | TATCAGCAGAAGCCT |
| | | GGAAAGGCCCCGAAG |
| | | CTGCTGATCTACGCC |
| | | GCGTCCAACTTGCAA |
| | | TCGGGAGTGCCAAGC |
| | | CGCTTTTCTGGTTCC |
| | | GGGAGCGGGACTGAC |
| | | TTCACCCTGACTATT |
| | | AGCAGCCTGCAGCCC |
| | | GAAGATTTCGCTACC |
| | | TACTACTGCCAACAG |
| | | TACACAGATGAATCC |
| | | ATGACCTTCGGACAG |
| | | GGCACCAAAGTCGAG |
| | | ATCAAG |
| SEQ ID NO: | Light Chain | DIQMTQSPSSLSASV |
| 2645 | | GDRVTITCRASQGIS |
| | | SDLNWYQQKPGKAPK |
| | | LLIYAASNLQSGVPS |
| | | RFSGSGSGTDFTLTI |
| | | SSLQPEDFATYYCQQ |
| | | YTDESMTFGQGTKVE |
| | | IKRTVAAPSVFIFPP |
| | | SDEQLKSGTASWCLL |
| | | NNFYPREAKVQWKVD |
| | | NALQSGNSQESVTEQ |
| | | DSKDSTYSLSSTLTL |
| | | SKADYEKHKVYACEV |
| | | THQGLSSPVTKSFNR |
| | | GEC |
| SEQ ID NO: | DNA Light | GACATTCAGATGACC |
| 2651 | Chain | CAGTCCCCGTCGTCC |
| | | CTGTCCGCATCCGTG |
| | | GGCGACAGAGTCACC |
| | | ATCACTTGCCGGGCC |
| | | TCACAGGGAATTTCC |
| | | TCCGACCTGAACTGG |
| | | TATCAGCAGAAGCCT |
| | | GGAAAGGCCCCGAAG |
| | | CTGCTGATCTACGCC |
| | | GCGTCCAACTTGCAA |
| | | TCGGGAGTGCCAAGC |
| | | CGCTTTTCTGGTTCC |
| | | GGGAGCGGGACTGAC |
| | | TTCACCCTGACTATT |
| | | AGCAGCCTGCAGCCC |
| | | GAAGATTTCGCTACC |
| | | TACTACTGCCAACAG |
| | | TACACAGATGAATCC |
| | | ATGACCTTCGGACAG |
| | | GGCACCAAAGTCGAG |
| | | ATCAAGCGTACGGTG |
| | | GCCGCTCCCAGCGTG |
| | | TTCATCTTCCCCCCC |
| | | AGCGACGAGCAGCTG |
| | | AAGAGCGGCACCGCC |
| | | AGCGTGGTGTGCCTG |
| | | CTGAACAACTTCTAC |
| | | CCCCGGGAGGCCAAG |
| | | GTGCAGTGGAAGGTG |
| | | GACAACGCCCTGCAG |
| | | AGCGGCAACAGCCAG |
| | | GAGAGCGTCACCGAG |
| | | CAGGACAGCAAGGAC |
| | | TCCACCTACAGCCTG |
| | | AGCAGCACCCTGACC |
| | | CTGAGCAAGGCCGAC |
| | | TACGAGAAGCATAAG |
| | | GTGTACGCCTGCGAG |
| | | GTGACCCACCAGGGC |
| | | CTGTCCAGCCCCGTG |
| | | ACCAAGAGCTTCAAC |
| | | AGGGGCGAGTGC |

MOR44746F

| | | |
|---|---|---|
| SEQ ID NO: | HCDR1 | GDSVSSSSAAWN |
| 2623 | (Combined) | |
| SEQ ID NO: | HCDR2 | HIGYRSKWYNEYAVS |
| 2624 | (Combined) | VKS |
| SEQ ID NO: | HCDR3 | GMYGSVPYKEGYYFD |
| 2625 | (Combined) | I |
| SEQ ID NO: | HCDR1 (Kabat) | SSSAAWN |
| 2626 | | |
| SEQ ID NO: | HCDR2 (Kabat) | HIGYRSKWYNEYAVS |
| 2624 | | VKS |
| SEQ ID NO: | HCDR3 (Kabat) | GMYGSVPYKEGYYFD |
| 2625 | | I |
| SEQ ID NO: | HCDR1 | GDSVSSSSA |
| 2627 | (Chothia) | |
| SEQ ID NO: | HCDR2 | GYRSKWY |
| 2628 | (Chothia) | |
| SEQ ID NO: | HCDR3 | GMYGSVPYKEGYYFD |
| 2625 | (Chothia) | I |
| SEQ ID NO: | HCDR1 (IMGT) | GDSVSSSSAA |
| 2629 | | |
| SEQ ID NO: | HCDR2 (IMGT) | IGYRSKWYN |
| 2630 | | |
| SEQ ID NO: | HCDR3 (IMGT) | ARGMYGSVPYKEGYY |
| 2631 | | FDI |
| SEQ ID NO: | VH | QVQLQQSGPGLVKPS |
| 2632 | | QTLSLTCAISGDSVS |
| | | SSSAAWNWIRQSPSR |
| | | GLEWLGHIGYRSKWY |
| | | NEYAVSVKSRITINP |
| | | DTSKNQFSLQLNSVT |
| | | PEDTAVYYCARGMYG |
| | | SVPYKEGYYFDIWGQ |
| | | GTLVTVSS |
| SEQ ID NO: | DNA VH | CAAGTGCAACTCCAG |
| 2647 | | CAGTCAGGACCGGGG |
| | | TTGGTCAAGCCTTCG |
| | | CAGACCCTGTCCCTC |
| | | ACTTGCGCCATTAGC |
| | | GGAGATTCGGTGTCG |
| | | TCGTCGTCAGCCGCC |
| | | TGGAACTGGATTAGA |
| | | CAGTCCCCTTCCCGA |
| | | GGGCTGGAGTGGCTG |
| | | GGCCACATCGGATAC |
| | | CGCAGCAAGTGGTAC |
| | | AACGAATACGCCGTC |
| | | AGCGTGAAGTCACGC |
| | | ATCACCATCAACCCG |
| | | GATACTAGCAAGAAC |
| | | CAGTTCAGCCTCCAG |
| | | TTGAACTCCGTGACC |
| | | CCGGAGGATACCGCC |
| | | GTGTACTACTGTGCG |
| | | CGGGGCATGTACGGA |
| | | TCCGTGCCGTACAAG |
| | | GAGGGATACTACTTC |
| | | GACATTTGGGGCCAG |
| | | GGGACTCTTGTCACC |
| | | GTGTCCTCG |
| SEQ ID NO: | Heavy Chain | QVQLQQSGPGLVKPS |
| 2658 | | QTLSLTCAISGDSVS |
| | | SSSAAWNWIRQSPSR |
| | | GLEWLGHIGYRSKWY |
| | | NEYAVSVKSRITINP |
| | | DTSKNQFSLQLNSVT |
| | | PEDTAVYYCARGMYG |
| | | SVPYKEGYYFDIWGQ |
| | | GTLVTVSSASTKGPS |
| | | VFPLAPSSKSTSGGT |
| | | AALGCLVKDYFPEPV |
| | | TVSWNSGALTSGVHT |
| | | FPAVLQSSGLYSLSS |
| | | VVTVPSSSLGTQTYI |
| | | CNVNHKPSNTKVDKR |
| | | VEPKSCDKTHTCPPC |
| | | PAPELLGGPSVFLFP |
| | | PKPKDTLYITREPEV |
| | | TCVVVDVSHEDPEVK |
| | | FNWYVDGVEVHNAKT |
| | | KPREEQYNSTYRVVS |
| | | VLTVLHQDWLNGKEY |
| | | KCKVSNKALPAPIEK |
| | | TISKAKGQPREPQVY |
| | | TLPPSREEMTKNQVS |
| | | LTCLVKGFYPSDIAV |
| | | EWESNGQPENNYKTT |
| | | PPVLDSDGSFFLYSK |
| | | LTVDKSRWQQGNVFS |
| | | CSVMHEALHNHYTQK |
| | | SLSLSPGK |
| SEQ ID NO: | DNA Heavy | CAAGTGCAACTCCAG |
| 2659 | Chain | CAGTCAGGACCGGGG |
| | | TTGGTCAAGCCTTCG |
| | | CAGACCCTGTCCCTC |
| | | ACTTGCGCCATTAGC |
| | | GGAGATTCGGTGTCG |
| | | TCGTCGTCAGCCGCC |
| | | TGGAACTGGATTAGA |
| | | CAGTCCCCTTCCCGA |
| | | GGGCTGGAGTGGCTG |
| | | GGCCACATCGGATAC |
| | | CGCAGCAAGTGGTAC |
| | | AACGAATACGCCGTC |
| | | AGCGTGAAGTCACGC |
| | | ATCACCATCAACCCG |
| | | GATACTAGCAAGAAC |
| | | CAGTTCAGCCTCCAG |
| | | TTGAACTCCGTGACC |
| | | CCGGAGGATACCGCC |
| | | GTGTACTACTGTGCG |
| | | CGGGGCATGTACGGA |
| | | TCCGTGCCGTACAAG |
| | | GAGGGATACTACTTC |
| | | GACATTTGGGGCCAG |
| | | GGGACTCTTGTCACC |
| | | GTGTCCTCGGCCTCC |
| | | ACTAAGGGCCCGTCA |
| | | GTGTTCCCCCTTGCG |
| | | CCATCCTCGAAGTCA |
| | | ACCTCCGGAGGAACT |
| | | GCCGCACTGGGTTGC |
| | | CTCGTGAAAGACTAT |
| | | TTCCCGGAACCCGTC |
| | | ACTGTCTCCTGGAAC |
| | | TCAGGAGCGCTCACC |
| | | AGCGGAGTGCATACC |
| | | TTTCCTGCGGTGCTG |
| | | CAGTCCAGCGGCCTG |
| | | TACTCCCTGAGCTCC |
| | | GTCGTGACCGTCCCC |
| | | TCGTCGTCCCTGGGA |
| | | ACCCAAACCTACATT |
| | | TGCAACGTCAATCAC |
| | | AAGCCAAGCAACACT |
| | | AAGGTGGACAAGAGA |
| | | GTGGAGCCCAAGTCC |
| | | TGCGATAAGACCCAC |
| | | ACCTGTCCTCCCTGT |
| | | CCGGCACCTGAACTG |
| | | CTTGGTGGACCTTCC |
| | | GTGTTCCTGTTCCCG |
| | | CCCAAGCCAAAAGAC |
| | | ACCCTGTATATCACT |
| | | CGCGAACCGGAAGTC |
| | | ACTTGCGTGGTCGTG |
| | | GACGTGTCCCACGAG |
| | | GACCCCGAGGTCAAG |
| | | TTTAATTGGTACGTG |
| | | GACGGAGTGGAAGTG |
| | | CACAACGCCAAGACC |
| | | AAGCCGCGGGAAGAA |
| | | CAGTACAACTCCACC |
| | | TACCGCGTGGTGTCC |
| | | GTCCTGACTGTGCTC |
| | | CACCAGGACTGGCTG |
| | | AACGGAAAGGAGTAC |
| | | AAGTGCAAAGTGTCC |
| | | AACAAGGCACTGCCA |
| | | GCCCCTATCGAAAAG |
| | | ACTATCTCCAAGGCC |
| | | AAGGGCCAACCTAGG |
| | | GAGCCCCAGGTGTAC |
| | | ACGTTGCCTCCTTCC |
| | | CGCGAAGAAATGACT |
| | | AAGAACCAGGTGTCG |
| | | CTGACCTGTCTCGTG |
| | | AAAGGGTTCTACCCC |
| | | TCTGACATCGCCGTG |
| | | GAATGGGAGTCAAAC |
| | | GGACAGCCTGAGAAC |
| | | AACTATAAGACCACA |
| | | CCACCTGTCCTGGAC |
| | | TCCGACGGCTCCTTC |
| | | TTCCTGTACTCAAAG |
| | | TTGACCGTGGACAAG |
| | | TCGCGGTGGCAACAG |
| | | GGCAACGTGTTCTCT |
| | | TGCTCCGTGATGCAC |
| | | GAAGCCCTGCACAAC |
| | | CACTACACCCAAAAG |
| | | TCGCTCAGCCTCTCC |
| | | CCCGGAAAG |
| SEQ ID NO: | LCDR1 | RASQGISSDLN |
| 2636 | (Combined) | |
| SEQ ID NO: | LCDR2 | AASNLQS |
| 2637 | (Combined) | |
| SEQ ID NO: | LCDR3 | QQYTDESMT |
| 2638 | (Combined) | |
| SEQ ID NO: | LCDR1 (Kabat) | RASQGISSDLN |
| 2636 | | |
| SEQ ID NO: | LCDR2 (Kabat) | AASNLQS |
| 2637 | | |
| SEQ ID NO: | LCDR3 (Kabat) | QQYTDESMT |
| 2638 | | |
| SEQ ID NO: | LCDR1 | SQGISSD |
| 2639 | (Chothia) | |
| SEQ ID NO: | LCDR2 | AAS |
| 2640 | (Chothia) | |
| SEQ ID NO: | LCDR3 | YTDESM |
| 2641 | (Chothia) | |
| SEQ ID NO: | LCDR1 (IMGT) | QGISSD |
| 2642 | | |
| SEQ ID NO: | LCDR2 (IMGT) | AAS |
| 2640 | | |
| SEQ ID NO: | LCDR3 (IMGT) | QQYTDESMT |
| 2638 | | |
| SEQ ID NO: | VL | DIQMTQSPSSLSASV |
| 2643 | | GDRVTITCRASQGIS |
| | | SDLNWYQQKPGKAPK |
| | | LLIYAASNLQSGVPS |
| | | RFSGSGSGTDFTLTI |
| | | SSLQPEDFATYYCQQ |
| | | YTDESMTFGQGTKVE |
| | | IK |
| SEQ ID NO: | DNA VL | GACATTCAGATGACC |
| 2650 | | CAGTCCCCGTCGTCC |
| | | CTGTCCGCATCCGTG |
| | | GGCGACAGAGTCACC |
| | | ATCACTTGCCGGGCC |
| | | TCACAGGGAATTTCC |
| | | TCCGACCTGAACTGG |
| | | TATCAGCAGAAGCCT |
| | | GGAAAGGCCCCGAAG |
| | | CTGCTGATCTACGCC |
| | | GCGTCCAACTTGCAA |
| | | TCGGGAGTGCCAAGC |
| | | CGCTTTTCTGGTTCC |
| | | GGGAGCGGGACTGAC |
| | | TTCACCCTGACTATT |
| | | AGCAGCCTGCAGCCC |
| | | GAAGATTTCGCTACC |
| | | TACTACTGCCAACAG |
| | | TACACAGATGAATCC |
| | | ATGACCTTCGGACAG |
| | | GGCACCAAAGTCGAG |
| | | ATCAAG |
| SEQ ID NO: | Light Chain | DIQMTQSPSSLSASV |
| 2645 | | GDRVTITCRASQGIS |
| | | SDLNWYQQKPGKAPK |
| | | LLIYAASNLQSGVPS |
| | | RFSGSGSGTDFTLTI |
| | | SSLQPEDFATYYCQQ |
| | | YTDESMTFGQGTKVE |
| | | IKRTVAAPSVFIFPP |
| | | SDEQLKSGTASVVCL |
| | | LNNFYPREAKVQWKV |
| | | DNALQSGNSQESVTE |
| | | QDSKDSTYSLSSTLT |
| | | LSKADYEKHKVYACE |
| | | VTHQGLSSPVTKSFN |
| | | RGEC |
| SEQ ID NO: | DNA Light | GACATTCAGATGACC |
| 2651 | Chain | CAGTCCCCGTCGTCC |
| | | CTGTCCGCATCCGTG |
| | | GGCGACAGAGTCACC |
| | | ATCACTTGCCGGGCC |
| | | TCACAGGGAATTTCC |
| | | TCCGACCTGAACTGG |
| | | TATCAGCAGAAGCCT |
| | | GGAAAGGCCCCGAAG |
| | | CTGCTGATCTACGCC |
| | | GCGTCCAACTTGCAA |
| | | TCGGGAGTGCCAAGC |
| | | CGCTTTTCTGGTTCC |
| | | GGGAGCGGGACTGAC |
| | | TTCACCCTGACTATT |
| | | AGCAGCCTGCAGCCC |
| | | GAAGATTTCGCTACC |
| | | TACTACTGCCAACAG |
| | | TACACAGATGAATCC |
| | | ATGACCTTCGGACAG |
| | | GGCACCAAAGTCGAG |
| | | ATCAAGCGTACGGTG |
| | | GCCGCTCCCAGCGTG |
| | | TTCATCTTCCCCCCC |
| | | AGCGACGAGCAGCTG |
| | | AAGAGCGGCACCGCC |
| | | AGCGTGGTGTGCCTG |
| | | CTGAACAACTTCTAC |
| | | CCCCGGGAGGCCAAG |
| | | GTGCAGTGGAAGGTG |
| | | GACAACGCCCTGCAG |
| | | AGCGGCAACAGCCAG |
| | | GAGAGCGTCACCGAG |
| | | CAGGACAGCAAGGAC |
| | | TCCACCTACAGCCTG |
| | | AGCAGCACCCTGACC |
| | | CTGAGCAAGGCCGAC |
| | | TACGAGAAGCATAAG |
| | | GTGTACGCCTGCGAG |
| | | GTGACCCACCAGGGC |
| | | CTGTCCAGCCCCGTG |
| | | ACCAAGAGCTTCAAC |
| | | AGGGGCGAGTGC |

MORO42596

| | | |
|---|---|---|
| SEQ ID NO: | HCDR1 | GYTFTGYHMS |
| 2586 | (Combined) | |
| SEQ ID NO: | HCDR2 | VINPVSGNTVYAQKF |
| 2587 | (Combined) | QG |
| SEQ ID NO: | HCDR3 | IPSYTYAFDY |
| 2588 | (Combined) | |
| SEQ ID NO: | HCDR1 (Kabat) | GYHMS |
| 2589 | | |
| SEQ ID NO: | HCDR2 (Kabat) | VINPVSGNTVYAQKF |
| 2587 | | QG |
| SEQ ID NO: | HCDR3 (Kabat) | IPSYTYAFDY |
| 2588 | | |
| SEQ ID NO: | HCDR1 | GYTFTGY |
| 2590 | (Chothia) | |
| SEQ ID NO: | HCDR2 | NPVSGN |
| 2591 | (Chothia) | |
| SEQ ID NO: | HCDR3 | IPSYTYAFDY |
| 2588 | (Chothia) | |
| SEQ ID NO: | HCDR1 (IMGT) | GYTFTGYH |
| 2592 | | |
| SEQ ID NO: | HCDR2 (IMGT) | INPVSGNT |
| 2593 | | |
| SEQ ID NO: | HCDR3 (IMGT) | ARIPSYTYAFDY |
| 2594 | | |
| SEQ ID NO: | VH | QVQLVQSGAEVKKPG |
| 2595 | | ASVKVSCKASGYTFT |
| | | GYHMSWVRQAPGQGL |
| | | EWMGVINPVSGNTVY |
| | | AQKFQGRVTMTRDTS |
| | | ISTAYMELSRLRSED |
| | | TAVYYCARIPSYTYA |
| | | FDYWGQGTLVTVSS |
| SEQ ID NO: | DNA VH | CAGGTGCAATTGGTG |
| 2596 | | CAGAGCGGTGCGGAA |
| | | GTGAAAAAACCGGGT |
| | | GCCAGCGTGAAAGTT |
| | | AGCTGCAAAGCGTCC |
| | | GGATATACCTTCACT |
| | | GGTTACCATATGTCT |
| | | TGGGTGCGCCAGGCC |
| | | CCGGGCCAGGGCCTC |
| | | GAGTGGATGGGCGTT |
| | | ATCAACCCGGTTTCT |
| | | GGCAACACGGTTTAC |
| | | GCGCAGAAATTTCAG |
| | | GGCCGGGTGACCATG |
| | | ACCCGTGATACCAGC |
| | | ATTAGCACCGCGTAT |
| | | ATGGAACTGAGCCGT |
| | | CTGCGTAGCGAAGAT |
| | | ACGGCCGTGTATTAT |
| | | TGCGCGCGTATCCCG |
| | | TCTTACACTTACGCT |
| | | TTCGATTACTGGGGC |
| | | CAAGGCACCCTGGTG |
| | | ACTGTTAGCTCA |
| SEQ ID NO: | Heavy Chain | QVQLVQSGAEVKKPG |
| 2597 | | ASVKVSCKASGYTFT |
| | | GYHMSWVRQAPGQGL |
| | | EWMGVINPVSGNTVY |
| | | AQKFQGRVTMTRDTS |
| | | ISTAYMELSRLRSED |
| | | TAVYYCARIPSYTYA |
| | | FDYWGQGTLVTVSSA |
| | | STKGPSVFPLAPSSK |
| | | STSGGTAALGCLVKD |
| | | YFPEPVTVSWNSGAL |
| | | TSGVHTFPAVLQSSG |
| | | LYSLSSVVTVPSSSL |
| | | GTQTYICNVNHKPSN |
| | | TKVDKRVEPKSCDKT |
| | | HTCPPCPAPEAAGGP |
| | | SVFLFPPKPKDTLMI |
| | | SRTPEVTCVVVDVSH |
| | | EDPEVKFNWYVDGVE |
| | | VHNAKTKPREEQYNS |
| | | TYRVVSVLTVLHQDW |
| | | LNGKEYKCKVSNKAL |
| | | PAPIEKTISKAKGQP |
| | | REPQVYTLPPSREEM |
| | | TKNQVSLTCLVKGFY |
| | | PSDIAVEWESNGQPE |
| | | NNYKTTPPVLDSDGS |
| | | FFLYSKLTVDKSRWQ |
| | | QGNVFSCSVMHEALH |
| | | NHYTQKSLSLSPGK |
| SEQ ID NO: | DNA Heavy | CAGGTGCAATTGGTG |
| 2598 | Chain | CAGAGCGGTGCGGAA |
| | | GTGAAAAAACCGGGT |
| | | GCCAGCGTGAAAGTT |
| | | AGCTGCAAAGCGTCC |
| | | GGATATACCTTCACT |
| | | GGTTACCATATGTCT |
| | | TGGGTGCGCCAGGCC |
| | | CCGGGCCAGGGCCTC |
| | | GAGTGGATGGGCGTT |
| | | ATCAACCCGGTTTCT |
| | | GGCAACACGGTTTAC |
| | | GCGCAGAAATTTCAG |
| | | GGCCGGGTGACCATG |
| | | ACCCGTGATACCAGC |
| | | ATTAGCACCGCGTAT |
| | | ATGGAACTGAGCCGT |
| | | CTGCGTAGCGAAGAT |
| | | ACGGCCGTGTATTAT |
| | | TGCGCGCGTATCCCG |
| | | TCTTACACTTACGCT |
| | | TTCGATTACTGGGGC |
| | | CAAGGCACCCTGGTG |
| | | ACTGTTAGCTCAGCC |
| | | TCCACCAAGGGTCCA |
| | | TCGGTCTTCCCCCTG |
| | | GCACCCTCCTCCAAG |
| | | AGCACCTCTGGGGGC |
| | | ACAGCGGCCCTGGGC |
| | | TGCCTGGTCAAGGAC |
| | | TACTTCCCCGAACCG |
| | | GTGACGGTGTCGTGG |
| | | AACTCAGGCGCCCTG |
| | | ACCAGCGGCGTGCAC |
| | | ACCTTCCCGGCTGTC |
| | | CTACAGTCCTCAGGA |
| | | CTCTACTCCCTCAGC |
| | | AGCGTGGTGACCGTG |
| | | CCCTCCAGCAGCTTG |
| | | GGCACCCAGACCTAC |
| | | ATCTGCAACGTGAAT |
| | | CACAAGCCCAGCAAC |
| | | ACCAAGGTGGACAAG |
| | | AGAGTTGAGCCCAAA |
| | | TCTTGTGACAAAACT |
| | | CACACATGCCCACCG |
| | | TGCCCAGCACCTGAA |
| | | GCAGCGGGGGGACCG |
| | | TCAGTCTTCCTCTTC |
| | | CCCCCAAAACCCAAG |
| | | GACACCCTCATGATC |
| | | TCCCGGACCCCTGAG |
| | | GTCACATGCGTGGTG |
| | | GTGGACGTGAGCCAC |
| | | GAAGACCCTGAGGTC |
| | | AAGTTCAACTGGTAC |
| | | GTGGACGGCGTGGAG |
| | | GTGCATAATGCCAAG |
| | | ACAAAGCCGCGGGAG |
| | | GAGCAGTACAACAGC |
| | | ACGTACCGGGTGGTC |
| | | AGCGTCCTCACCGTC |
| | | CTGCACCAGGACTGG |
| | | CTGAATGGCAAGGAG |
| | | TACAAGTGCAAGGTC |
| | | TCCAACAAAGCCCTC |
| | | CCAGCCCCCATCGAG |
| | | AAAACCATCTCCAAA |
| | | GCCAAAGGGCAGCCC |
| | | CGAGAACCACAGGTG |
| | | TACACCCTGCCCCCA |
| | | TCCCGGGAGGAGATG |
| | | ACCAAGAACCAGGTC |
| | | AGCCTGACCTGCCTG |
| | | GTCAAAGGCTTCTAT |
| | | CCCAGCGACATCGCC |
| | | GTGGAGTGGGAGAGC |
| | | AATGGGCAGCCGGAG |
| | | AACAACTACAAGACC |
| | | ACGCCTCCCGTGCTG |
| | | GACTCCGACGGCTCC |
| | | TTCTTCCTCTACAGC |
| | | AAGCTCACCGTGGAC |
| | | AAGAGCAGGTGGCAG |
| | | CAGGGGAACGTCTTC |
| | | TCATGCTCCGTGATG |
| | | CATGAGGCTCTGCAC |
| | | AACCACTACACGCAG |
| | | AAGAGCCTCTCCCTG |
| | | TCTCCGGGTAAA |
| SEQ ID NO: | LCDR1 | RASQDISNYLA |
| 2599 | (Combined) | |
| SEQ ID NO: | LCDR2 | RASSLQS |
| 2600 | (Combined) | |
| SEQ ID NO: | LCDR3 | QQHGHSPTT |
| 2660 | (Combined) | |
| SEQ ID NO: | LCDR1 (Kabat) | RASQDISNYLA |
| 2599 | | |
| SEQ ID NO: | LCDR2 (Kabat) | RASSLQS |
| 2600 | | |
| SEQ ID NO: | LCDR3 (Kabat) | QQHGHSPTT |
| 2660 | | |
| SEQ ID NO: | LCDR1 | SQDISNY |
| 2602 | (Chothia) | |
| SEQ ID NO: | LCDR2 | RAS |
| 2603 | (Chothia) | |
| SEQ ID NO: | LCDR3 | HGHSPT |
| 2661 | (Chothia) | |
| SEQ ID NO: | LCDR1 (IMGT) | QDISNY |
| 2605 | | |
| SEQ ID NO: | LCDR2 (IMGT) | RAS |
| 2603 | | |
| SEQ ID NO: | LCDR3 (IMGT) | QQHGHSPTT |
| 2660 | | |
| SEQ ID NO: | VL | DIQMTQSPSSLSASV |
| 2662 | | GDRVTITCRASQDIS |
| | | NYLAWYQQKPGKAPK |
| | | LLIYRASSLQSGVPS |
| | | RFSGSGSGTDFTLTI |
| | | SSLQPEDFATYYCQQ |
| | | HGHSPTTFGQGTKVE |
| | | IK |
| SEQ ID NO: | DNA VL | GATATCCAGATGACC |
| 2663 | | CAGAGCCCGAGCAGC |
| | | CTGAGCGCCAGCGTG |
| | | GGCGATCGCGTGACC |
| | | ATTACCTGCAGAGCC |
| | | AGCCAGGACATTTCT |
| | | AACTACCTGGCTTGG |
| | | TACCAGCAGAAACCG |
| | | GGCAAAGCGCCGAAA |
| | | CTATTAATCTACCGT |
| | | GCTTCTTCTCTGCAA |
| | | AGCGGCGTGCCGAGC |
| | | CGCTTTAGCGGCAGC |
| | | GGATCCGGCACCGAT |
| | | TTCACCCTGACCATT |
| | | AGCTCTCTGCAACCG |
| | | GAAGACTTTGCGACC |
| | | TATTATTGCCAGCAG |
| | | CATGGTCATTCTCCG |
| | | ACTACCTTTGGCCAG |
| | | GGCACGAAAGTTGAA |
| | | ATTAAA |
| SEQ ID NO: | Light Chain | DIQMTQSPSSLSASV |
| 2664 | | GDRVTITCRASQDIS |
| | | NYLAWYQQKPGKAPK |
| | | LLIYRASSLQSGVPS |
| | | RFSGSGSGTDFTLTI |
| | | SSLQPEDFATYYCQQ |
| | | HGHSPTTFGQGTKVE |
| | | IKRTVAAPSVFIFPP |
| | | SDEQLKSGTASWCLL |
| | | NNFYPREAKVQWKVD |
| | | NALQSGNSQESVTEQ |
| | | DSKDSTYSLSSTLTL |
| | | SKADYEKHKVYACEV |
| | | THQGLSSPVTKSFNR |
| | | GEC |
| SEQ ID NO: | DNA Light | GATATCCAGATGACC |
| 2665 | Chain | CAGAGCCCGAGCAGC |
| | | CTGAGCGCCAGCGTG |
| | | GGCGATCGCGTGACC |
| | | ATTACCTGCAGAGCC |
| | | AGCCAGGACATTTCT |
| | | AACTACCTGGCTTGG |
| | | TACCAGCAGAAACCG |
| | | GGCAAAGCGCCGAAA |
| | | CTATTAATCTACCGT |
| | | GCTTCTTCTCTGCAA |
| | | AGCGGCGTGCCGAGC |
| | | CGCTTTAGCGGCAGC |
| | | GGATCCGGCACCGAT |
| | | TTCACCCTGACCATT |
| | | AGCTCTCTGCAACCG |
| | | GAAGACTTTGCGACC |
| | | TATTATTGCCAGCAG |
| | | CATGGTCATTCTCCG |
| | | ACTACCTTTGGCCAG |
| | | GGCACGAAAGTTGAA |
| | | ATTAAACGTACGGTG |
| | | GCCGCTCCCAGCGTG |
| | | TTCATCTTCCCCCCC |
| | | AGCGACGAGCAGCTG |
| | | AAGAGCGGCACCGCC |
| | | AGCGTGGTGTGCCTG |
| | | CTGAACAACTTCTAC |
| | | CCCCGGGAGGCCAAG |
| | | GTGCAGTGGAAGGTG |
| | | GACAACGCCCTGCAG |
| | | AGCGGCAACAGCCAG |
| | | GAAAGCGTCACCGAG |
| | | CAGGACAGCAAGGAC |
| | | TCCACCTACAGCCTG |
| | | AGCAGCACCCTGACC |
| | | CTGAGCAAGGCCGAC |
| | | TACGAGAAGCACAAG |
| | | GTGTACGCCTGCGAG |
| | | GTGACCCACCAGGGC |
| | | CTGTCCAGCCCCGTG |
| | | ACCAAGAGCTTCAAC |
| | | CGGGGCGAGTGT |

MOR041877

| | | |
|---|---|---|
| SEQ ID NO: | HCDR1 | GFSLSTSGVGVS |
| 2666 | (Combined) | |
| SEQ ID NO: | HCDR2 | LIFSDHDKIYSTSLK |
| 2667 | (Combined) | T |
| SEQ ID NO: | HCDR3 | TLIDRSVYFDY |
| 2668 | (Combined) | |
| SEQ ID NO: | HCDR1 (Kabat) | TSGVGVS |
| 2669 | | |
| SEQ ID NO: | HCDR2 (Kabat) | LIFSDHDKIYSTSLK |
| 2667 | | T |
| SEQ ID NO: | HCDR3 (Kabat) | TLIDRSVYFDY |
| 2668 | | |
| SEQ ID NO: | HCDR1 | GFSLSTSGV |
| 2670 | (Chothia) | |
| SEQ ID NO: | HCDR2 | FSDHD |
| 2671 | (Chothia) | |
| SEQ ID NO: | HCDR3 | TLIDRSVYFDY |
| 2668 | (Chothia) | |
| SEQ ID NO: | HCDR1 (IMGT) | GFSLSTSGVG |
| 2672 | | |
| SEQ ID NO: | HCDR2 (IMGT) | IFSDHDK |
| 2673 | | |
| SEQ ID NO: | HCDR3 (IMGT) | ARTLIDRSVYFDY |
| 2674 | | |
| SEQ ID NO: | VH | QVQLKESGPALVKPT |
| 2675 | | QTLTLTCTFSGFSLS |
| | | TSGVGVSWIRQPPGK |
| | | ALEWLALIFSDHDKI |
| | | YSTSLKTRLTISKDT |
| | | SKNQVVLTMTNMDPV |
| | | DTATYYCARTLIDRS |
| | | VYFDYWGQGTLVTVS |
| | | S |
| SEQ ID NO: | DNA VH | CAGGTGCAATTGAAA |
| 2676 | | GAAAGCGGTCCGGCG |
| | | CTGGTGAAACCGACC |
| | | CAGACCCTGACCCTG |
| | | ACGTGCACCTTTTCC |
| | | GGATTCAGCCTGTCT |
| | | ACTTCCGGTGTTGGT |
| | | GTGAGCTGGATTCGC |
| | | CAGCCGCCGGGCAAA |
| | | GCGCTCGAGTGGCTG |
| | | GCGCTGATCTTCTCT |
| | | GACCATGACAAGATC |
| | | TATAGCACCAGCCTG |
| | | AAAACCCGTCTGACC |
| | | ATTAGCAAAGATACT |
| | | TCGAAAAACCAGGTG |
| | | GTGCTGACCATGACC |
| | | AACATGGACCCGGTG |
| | | GATACCGCGACCTAT |
| | | TATTGCGCGCGTACT |
| | | CTGATCGACCGTTCT |
| | | GTTTACTTCGATTAC |
| | | TGGGGCCAAGGCACC |
| | | CTGGTGACTGTTAGC |
| | | TCA |
| SEQ ID NO: | Heavy Chain | QVQLKESGPALVKPT |
| 2677 | | QTLTLTCTFSGFSLS |
| | | TSGVGVSWIRQPPGK |
| | | ALEWLALIFSDHDKI |
| | | YSTSLKTRLTISKDT |
| | | SKNQVVLTMTNMDPV |
| | | DTATYYCARTLIDRS |
| | | VYFDYWGQGTLVTVS |
| | | SASTKGPSVFPLAPS |
| | | SKSTSGGTAALGCLV |
| | | KDYFPEPVTVSWNSG |
| | | ALTSGVHTFPAVLQS |
| | | SGLYSLSSVVTVPSS |
| | | SLGTQTYICNVNHKP |
| | | SNTKVDKRVEPKSCD |
| | | KTHTCPPCPAPEAAG |
| | | GPSVFLFPPKPKDTL |
| | | MISRTPEVTCVVVDV |
| | | SHEDPEVKFNWYVDG |
| | | VEVHNAKTKPREEQY |
| | | NSTYRVVSVLTVLHQ |
| | | DWLNGKEYKCKVSNK |
| | | ALPAPIEKTISKAKG |
| | | QPREPQVYTLPPSRE |
| | | EMTKNQVSLTCLVKG |
| | | FYPSDIAVEWESNGQ |
| | | PENNYKTTPPVLDSD |
| | | GSFFLYSKLTVDKSR |
| | | WQQGNVFSCSVMHEA |
| | | LHNHYTQKSLSLSPG |
| | | K |
| SEQ ID NO: | DNA Heavy | CAGGTGCAATTGAAA |
| 2678 | Chain | GAAAGCGGTCCGGCG |
| | | CTGGTGAAACCGACC |
| | | CAGACCCTGACCCTG |
| | | ACGTGCACCTTTTCC |
| | | GGATTCAGCCTGTCT |
| | | ACTTCCGGTGTTGGT |
| | | GTGAGCTGGATTCGC |
| | | CAGCCGCCGGGCAAA |
| | | GCGCTCGAGTGGCTG |
| | | GCGCTGATCTTCTCT |
| | | GACCATGACAAGATC |
| | | TATAGCACCAGCCTG |
| | | AAAACCCGTCTGACC |
| | | ATTAGCAAAGATACT |
| | | TCGAAAAACCAGGTG |
| | | GTGCTGACCATGACC |
| | | AACATGGACCCGGTG |
| | | GATACCGCGACCTAT |
| | | TATTGCGCGCGTACT |
| | | CTGATCGACCGTTCT |
| | | GTTTACTTCGATTAC |
| | | TGGGGCCAAGGCACC |
| | | CTGGTGACTGTTAGC |
| | | TCAGCCTCCACCAAG |
| | | GGTCCATCGGTCTTC |
| | | CCCCTGGCACCCTCC |
| | | TCCAAGAGCACCTCT |
| | | GGGGGCACAGCGGCC |
| | | CTGGGCTGCCTGGTC |
| | | AAGGACTACTTCCCC |
| | | GAACCGGTGACGGTG |
| | | TCGTGGAACTCAGGC |
| | | GCCCTGACCAGCGGC |
| | | GTGCACACCTTCCCG |
| | | GCTGTCCTACAGTCC |
| | | TCAGGACTCTACTCC |
| | | CTCAGCAGCGTGGTG |
| | | ACCGTGCCCTCCAGC |
| | | AGCTTGGGCACCCAG |
| | | ACCTACATCTGCAAC |
| | | GTGAATCACAAGCCC |
| | | AGCAACACCAAGGTG |
| | | GACAAGAGAGTTGAG |
| | | CCCAAATCTTGTGAC |
| | | AAAACTCACACATGC |
| | | CCACCGTGCCCAGCA |
| | | CCTGAAGCAGCGGGG |
| | | GGACCGTCAGTCTTC |
| | | CTCTTCCCCCCAAAA |
| | | CCCAAGGACACCCTC |
| | | ATGATCTCCCGGACC |
| | | CCTGAGGTCACATGC |
| | | GTGGTGGTGGACGTG |
| | | AGCCACGAAGACCCT |
| | | GAGGTCAAGTTCAAC |
| | | TGGTACGTGGACGGC |
| | | GTGGAGGTGCATAAT |
| | | GCCAAGACAAAGCCG |
| | | CGGGAGGAGCAGTAC |
| | | AACAGCACGTACCGG |
| | | GTGGTCAGCGTCCTC |
| | | ACCGTCCTGCACCAG |
| | | GACTGGCTGAATGGC |
| | | AAGGAGTACAAGTGC |
| | | AAGGTCTCCAACAAA |
| | | GCCCTCCCAGCCCCC |
| | | ATCGAGAAAACCATC |
| | | TCCAAAGCCAAAGGG |
| | | CAGCCCCGAGAACCA |
| | | CAGGTGTACACCCTG |
| | | CCCCCATCCCGGGAG |
| | | GAGATGACCAAGAAC |
| | | CAGGTCAGCCTGACC |
| | | TGCCTGGTCAAAGGC |
| | | TTCTATCCCAGCGAC |
| | | ATCGCCGTGGAGTGG |
| | | GAGAGCAATGGGCAG |
| | | CCGGAGAACAACTAC |
| | | AAGACCACGCCTCCC |
| | | GTGCTGGACTCCGAC |
| | | GGCTCCTTCTTCCTC |
| | | TACAGCAAGCTCACC |
| | | GTGGACAAGAGCAGG |
| | | TGGCAGCAGGGGAAC |
| | | GTCTTCTCATGCTCC |
| | | GTGATGCATGAGGCT |
| | | CTGCACAACCACTAC |
| | | ACGCAGAAGAGCCTC |
| | | TCCCTGTCTCCGGGT |
| | | AAA |
| SEQ ID NO: | LCDR1 | SGSSSNIGHHYVS |
| 2679 | (Combined) | |
| SEQ ID NO: | LCDR2 | DNTNRPS |
| 2680 | (Combined) | |
| SEQ ID NO: | LCDR3 | ATWDGLMNSIV |
| 2681 | (Combined) | |
| SEQ ID NO: | LCDR1 (Kabat) | SGSSSNIGHHYVS |
| 2679 | | |
| SEQ ID NO: | LCDR2 (Kabat) | DNTNRPS |
| 2680 | | |
| SEQ ID NO: | LCDR3 (Kabat) | ATWDGLMNSIV |
| 2681 | | |
| SEQ ID NO: | LCDR1 | SSSNIGHHY |
| 2682 | (Chothia) | |
| SEQ ID NO: | LCDR2 | DNT |
| 2683 | (Chothia) | |
| SEQ ID NO: | LCDR3 | WDGLMNSI |
| 2684 | (Chothia) | |
| SEQ ID NO: | LCDR1 (IMGT) | SSNIGHHY |
| 2685 | | |
| SEQ ID NO: | LCDR2 (IMGT) | DNT |
| 2683 | | |
| SEQ ID NO: | LCDR3 (IMGT) | ATWDGLMNSIV |
| 2681 | | |
| SEQ ID NO: | VL | DIVLTQPPSVSGAPG |
| 2686 | | QRVTISCSGSSSNIG |
| | | HHYVSWYQQLPGTAP |
| | | KLLIYDNTNRPSGVP |
| | | DRFSGSKSGTSASLA |
| | | ITGLQAEDEADYYCA |
| | | TWDGLMNSIVFGGGT |
| | | KLTVL |
| SEQ ID NO: | DNA VL | GATATCGTGCTGACC |
| 2687 | | CAGCCGCCGAGCGTG |
| | | AGCGGTGCACCGGGC |
| | | CAGCGCGTGACCATT |
| | | AGCTGTAGCGGCAGC |
| | | AGCAGCAACATTGGT |
| | | CATCATTACGTGTCT |
| | | TGGTACCAGCAGCTG |
| | | CCGGGCACGGCGCCG |
| | | AAACTGCTGATCTAC |
| | | GACAACACTAACCGC |
| | | CCGAGCGGCGTGCCG |
| | | GATCGCTTTAGCGGA |
| | | TCCAAAAGCGGCACC |
| | | AGCGCCAGCCTGGCG |
| | | ATTACCGGCCTGCAA |
| | | GCAGAAGACGAAGCG |
| | | GATTATTACTGCGCT |
| | | ACTTGGGACGGTCTG |
| | | ATGAACTCTATCGTG |
| | | TTTGGCGGCGGCACG |
| | | AAGTTAACCGTCCTA |
| SEQ ID NO: | Light Chain | DIVLTQPPSVSGAPG |
| 2688 | | QRVTISCSGSSSNIG |
| | | HHYVSWYQQLPGTAP |
| | | KLLIYDNTNRPSGVP |
| | | DRFSGSKSGTSASLA |
| | | ITGLQAEDEADYYCA |
| | | TWDGLMNSIVFGGGT |
| | | KLTVLGQPKAAPSVT |
| | | LFPPSSEELQANKAT |
| | | LVCLISDFYPGAVTV |
| | | AWKADSSPVKAGVET |
| | | TTPSKQSNNKYAASS |
| | | YLSLTPEQWKSHRSY |
| | | SCQVTHEGSTVEKTV |
| | | APTECS |
| SEQ ID NO: | DNA Light | GATATCGTGCTGACC |
| 2689 | Chain | CAGCCGCCGAGCGTG |
| | | AGCGGTGCACCGGGC |
| | | CAGCGCGTGACCATT |
| | | AGCTGTAGCGGCAGC |
| | | AGCAGCAACATTGGT |
| | | CATCATTACGTGTCT |
| | | TGGTACCAGCAGCTG |
| | | CCGGGCACGGCGCCG |
| | | AAACTGCTGATCTAC |
| | | GACAACACTAACCGC |
| | | CCGAGCGGCGTGCCG |
| | | GATCGCTTTAGCGGA |
| | | TCCAAAAGCGGCACC |
| | | AGCGCCAGCCTGGCG |
| | | ATTACCGGCCTGCAA |
| | | GCAGAAGACGAAGCG |
| | | GATTATTACTGCGCT |
| | | ACTTGGGACGGTCTG |
| | | ATGAACTCTATCGTG |
| | | TTTGGCGGCGGCACG |
| | | AAGTTAACCGTCCTA |
| | | GGTCAGCCCAAGGCT |
| | | GCCCCCTCGGTCACT |
| | | CTGTTCCCGCCCTCC |
| | | TCTGAGGAGCTTCAA |
| | | GCCAACAAGGCCACA |
| | | CTGGTGTGTCTCATA |
| | | AGTGACTTCTACCCG |
| | | GGAGCCGTGACAGTG |
| | | GCCTGGAAGGCAGAT |
| | | AGCAGCCCCGTCAAG |
| | | GCGGGAGTGGAGACC |
| | | ACCACACCCTCCAAA |
| | | CAAAGCAACAACAAG |
| | | TACGCGGCCAGCAGC |
| | | TATCTGAGCCTGACG |
| | | CCTGAGCAGTGGAAG |
| | | TCCCACAGAAGCTAC |
| | | AGCTGCCAGGTCACG |
| | | CATGAAGGGAGCACC |
| | | GTGGAGAAGACAGTG |
| | | GCCCCTACAGAATGT |
| | | TCA |

[0550] In some embodiments, each of the light chain variable regions and each of the heavy chain variable regions disclosed above, including those in Table 18 above, may be attached to the light chain constant regions (Table 4) and heavy chain constant regions (Table 5) to form complete antibody light and heavy chains, respectively, as further discussed below. Further, each of the generated heavy and light chain sequences may be combined to form a complete antibody structure. It should be understood that the heavy chain and light chain variable regions provided herein can also be attached to other constant domains having different sequences than the exemplary sequences listed herein.

K. KR Patent Application Publication No. KR20200048069A

[0551] In some embodiments, the TREM2 agonist is an antibody, or an antigen-binding fragment thereof, as described in KR Patent Application Publication No. KR20200048069A, which is incorporated by reference herein, in its entirety.

[0552] In some embodiments, the TREM2 antibody comprises the CDR L1, CDR L2 and CDR L3 in the light chain variable region of the antibody produced by hybridoma cells with accession number KCTC 13471BP or hybridoma cells with accession number KTC 13470BP.

[0553] In some embodiments, the TREM2 antibody comprises the CDR H1, CDR H2 and CDR H3 in the heavy chain variable region of the antibody produced by hybridoma cells with accession number KCTC 13471BP or hybridoma cells with accession number KTC 13470BP.

[0554] In some embodiments, the TREM2 antibody comprises the CDR L1, CDR L2 and CDR L3 in the light chain variable region and the CDR H1, CDR H2 and CDR H3 in the heavy chain variable region of the antibody produced by hybridoma cells with accession number KCTC 13471BP or hybridoma cells with accession number KTC 13470BP.

[0555] In some embodiments, the TREM2 antibody comprises the light chain variable region and the heavy chain variable region of the antibody produced by hybridoma cells with accession number KCTC 13471BP or hybridoma cells with accession number KTC 13470BP.

[0556] In some embodiments, the TREM2 agonist is an antibody produced by hybridoma cells with accession number KCTC 13471BP or hybridoma cells with accession number KTC 13470BP.

[0557] In some embodiments, the light chain variable regions and the heavy chain variable regions describe above for the antibody produced by hybridoma cells with accession number KCTC 13471BP or hybridoma cells with accession number KTC 13470BP may be attached to the light chain constant regions (Table 4) and heavy chain constant regions (Table 5) to form complete antibody light and heavy chains, respectively, as further discussed below. Further, each of the generated heavy and light chain sequences may be combined to form a complete antibody structure. It should be understood that the heavy chain and light chain variable regions provided herein can also be attached to other constant domains having different sequences than the exemplary sequences listed herein.

L. PCT Patent Application Publication No. WO2020/172450A1

[0558] In some embodiments, the TREM2 agonist is an antibody, or an antigen-binding fragment thereof, as described in PCT Patent Application Publication No. WO2020/172450A1 (“the '450 application”), which is incorporated by reference herein, in its entirety.

[0559] In some embodiments, the antibody or antigen-binding fragment thereof comprises:
[0560] (a) a CDR-H1 sequence comprising the sequence of GFSIEDFYIH (SEQ ID NO: 2717);
[0561] (b) a CDR-H2 sequence comprising the sequence of Y-I-D-P-E-β₆-G-β₈-S-K-Y-A-P-K-F-Q-G (SEQ ID NO: 2735), wherein β₆ is N or Q and β₈ is D or E;
[0562] (c) a CDR-H3 sequence comprising the sequence of HADHGNYGSTMDY (SEQ ID NO: 2719);
[0563] (d) CDR-L1 sequence comprising the sequence of HASQHINVWLS (SEQ ID NO: 2720);
[0564] (e) a CDR-L2 sequence comprising the sequence of KASNLHT (SEQ ID NO: 2721); and
[0565] (f) a CDR-L3 sequence comprising the sequence of QQGQTYPRT (SEQ ID NO: 2722).

[0566] In some embodiments, the CDR-H2 sequence is selected from SEQ ID NOS: 2718, 2727, 2729, and 2731.

[0567] In some embodiments, the antibody or antigen-binding fragment comprises:
[0568] (a) a CDR-H1 comprising the amino acid sequence of SEQ ID NO: 2717, a CDR-H2 comprising the amino acid sequence of SEQ ID NO: 2718, a CDR-H3 comprising the amino acid sequence of SEQ ID NO: 2719, a CDR-L1 comprising the amino acid sequence of SEQ ID NO: 2720, a CDR-L2 comprising the amino acid sequence of SEQ ID NO: 2721, and a CDR-L3 comprising the amino acid sequence of SEQ ID NO: 2722; or
[0569] (b) a CDR-H1 comprising the amino acid sequence of SEQ ID NO: 2717, a CDR-H2 comprising the amino acid sequence of SEQ ID NO: 2727, a CDR-H3 comprising the amino acid sequence of SEQ ID NO: 2719, a CDR-L1 comprising the amino acid sequence of SEQ ID NO: 2720, a CDR-L2 comprising the amino acid sequence of SEQ ID NO: 2721, and a CDR-L3 comprising the amino acid sequence of SEQ ID NO: 2722; or
[0570] (c) a CDR-H1 comprising the amino acid sequence of SEQ ID NO: 2717, a CDR-H2 comprising the amino acid sequence of SEQ ID NO: 2729, a CDR-H3 comprising the amino acid sequence of SEQ ID NO: 2719, a CDR-L1 comprising the amino acid sequence of SEQ ID NO: 2720, a CDR-L2 comprising the amino acid sequence of SEQ ID NO: 2721, and a CDR-L3 comprising the amino acid sequence of SEQ ID NO: 2722; or
[0571] (d) a CDR-H1 comprising the amino acid sequence of SEQ ID NO: 2717, a CDR-H2 comprising the amino acid sequence of SEQ ID NO: 2731, a CDR-H3 comprising the amino acid sequence of SEQ ID NO: 2719, a CDR-L1 comprising the amino acid sequence of SEQ ID NO: 2720, a CDR-L2 comprising the amino acid sequence of SEQ ID NO: 2721, and a CDR-L3 comprising the amino acid sequence of SEQ ID NO: 2722.

[0572] In some embodiments, the antibody or antigen-binding fragment comprises a V H sequence that has at least 85% sequence identity to any one of SEQ ID NOS: 2715, 2723, 2725, 2726, 2728, 2730, 2732, 2733, and 2734. In some embodiments, the V H sequence has at least 90% sequence identity to SEQ ID NO: 2715. In some embodiments, the VH sequence has at least 95% sequence identity to SEQ ID NO: 2715. In some embodiments, the V_{H} sequence comprises SEQ ID NO: 2715. In some embodiments, the V_{H} sequence has at least 90% sequence identity to SEQ ID NO: 2730. In some embodiments, the V_{H} sequence has at least 95% sequence identity to SEQ ID NO: 2730. In some embodiments, the V_{H} sequence comprises SEQ ID NO: 2730. In some embodiments, the V_{H} sequence has at least 90% sequence identity to SEQ ID NO: 2733. In some embodiments, the V_{H} sequence has at least 95% sequence identity to SEQ ID NO: 2733. In some embodiments, the V_{H} sequence comprises SEQ ID NO: 2733.

[0573] In some embodiments, the antibody or antigen-binding fragment comprises a V_{L} sequence that has at least 85% sequence identity to SEQ ID NO: 2716 or SEQ ID NO: 2724. In some embodiments, the V_{L} sequence has at least 90% sequence identity to SEQ ID NO: 2716. In some embodiments, the V_{L} sequence has at least 95% sequence identity to SEQ ID NO: 2716. In some embodiments, the V_{L} sequence comprises SEQ ID NO: 2716. In some embodiments, the V_{L} sequence has at least 90% sequence identity to SEQ ID NO: 2724. In some embodiments, the V_{L} sequence has at least 95% sequence identity to SEQ ID NO: 2724. In some embodiments, the V_{L} sequence comprises SEQ ID NO: 2724.

[0574] In some embodiments, the antibody or antigen-binding fragment comprises:
[0575] (a) a VH sequence comprising SEQ ID NO: 2715 and a V_{L} sequence comprising SEQ ID NO: 2716; or
[0576] (b) a VH sequence comprising SEQ ID NO: 2723 and a V_{L} sequence comprising SEQ ID NO: 2724; or
[0577] (c) a VH sequence comprising SEQ ID NO: 2725 and a V_{L} sequence comprising SEQ ID NO: 2724; or
[0578] (d) a VH sequence comprising SEQ ID NO: 2726 and a V_{L} sequence comprising SEQ ID NO: 2724; or
[0579] (e) a VH sequence comprising SEQ ID NO: 2728 and a V_{L} sequence comprising SEQ ID NO: 2724; or
[0580] (f) a VH sequence comprising SEQ ID NO: 2730 and a V_{L} sequence comprising SEQ ID NO: 2724; or
[0581] (g) a VH sequence comprising SEQ ID NO: 2732 and a V_{L} sequence comprising SEQ ID NO: 2724; or
[0582] (h) a VH sequence comprising SEQ ID NO: 2733 and a VL sequence comprising SEQ ID NO: 2724; or
[0583] (i) a VH sequence comprising SEQ ID NO: 2734 and a VL sequence comprising SEQ ID NO: 2724.

[0584] In some embodiments, an antibody or antigen-binding fragment thereof that specifically binds to TREM2 comprises:
[0585] (a) a CDR-H1 sequence comprising the sequence of G-F-T-F-T-α₆-F-Y-M-S(SEQ ID NO: 2736), wherein α₆ is D or N;
[0586] (b) a CDR-H2 sequence comprising the sequence of V-I-R-N-β₅-β₆-N-β₈-Y-T-β₁₁-β₁₂-Y-N-P-S-V-K-G (SEQ ID NO: 2737), wherein β₅ is K or R; β₆ is A or P; β₈ is G or A; Oil is A or T; and β₁₂ is G or D;
[0587] (c) a CDR-H3 sequence comprising the sequence of γ₁-R-L-γ₄-Y-G-F-D-Y (SEQ ID NO: 2738), wherein γ₁ is A or T; and γ₄ is T or S;
[0588] (d) a CDR-L1 sequence comprising the sequence of Q-S-S-K-S-L-L-H-S-δ₁₀-G-K-T-Y-L-N (SEQ ID NO: 2739), wherein δ₁₀ is N or T;
[0589] (e) a CDR-L2 sequence comprising the sequence of WMSTRAS (SEQ ID NO: 2696); and
[0590] (f) a CDR-L3 sequence comprising the sequence of Q-Q-F-L-ϕ₆-P-F-T (SEQ ID NO: 2740), wherein ϕ₆ is Y or F.

[0591] In some embodiments, the CDR-H1 sequence is selected from any one of SEQ ID NOS: 2692 and 2700. In some embodiments, the CDR-H2 sequence is selected from any one of SEQ ID NOS: 2693, 2701, and 2713. In some embodiments, the CDR-H3 sequence is selected from any one of SEQ ID NOS: 2694, 2702, and 2705. In some embodiments, the CDR-L1 sequence is selected from any one of SEQ ID NOS: 2695 and 2711. In some embodiments, the CDR-L3 sequence is selected from any one of SEQ ID NOS: 2697 and 2706.

[0592] In some embodiments, the antibody or antigen-binding fragment comprises:
[0593] (a) a CDR-H1 comprising the amino acid sequence of SEQ ID NO: 2692, a CDR-H2 comprising the amino acid sequence of SEQ ID NO: 2693, a CDR-H3 comprising the amino acid sequence of SEQ ID NO: 2705, a CDR-L1 comprising the amino acid sequence of SEQ ID NO: 2695, a CDR-L2 comprising the amino acid sequence of SEQ ID NO: 2696, and a CDR-L3 comprising the amino acid sequence of SEQ ID NO: 2706; or
[0594] (b) a CDR-H1 comprising the amino acid sequence of SEQ ID NO: 2692, a CDR-H2 comprising the amino acid sequence of SEQ ID NO: 2693, a CDR-H3 comprising the amino acid sequence of SEQ ID NO: 2705, a CDR-L1 comprising the amino acid sequence of SEQ ID NO: 2711, a CDR-L2 comprising the amino acid sequence of SEQ ID NO: 2696, and a CDR-L3 comprising the amino acid sequence of SEQ ID NO: 2706; or
[0595] (c) a CDR-H1 comprising the amino acid sequence of SEQ ID NO: 2692, a CDR-H2 comprising the amino acid sequence of SEQ ID NO: 2713, a CDR-H3 comprising the amino acid sequence of SEQ ID NO: 2705, a CDR-L1 comprising the amino acid sequence of SEQ ID NO: 2695, a CDR-L2 comprising the amino acid sequence of SEQ ID NO: 2696, and a CDR-L3 comprising the amino acid sequence of SEQ ID NO: 2706; or
[0596] (d) a CDR-H1 comprising the amino acid sequence of SEQ ID NO: 2692, a CDR-H2 comprising the amino acid sequence of SEQ ID NO: 2713, a CDR-H3 comprising the amino acid sequence of SEQ ID NO: 2705, a CDR-L1 comprising the amino acid sequence of SEQ ID NO: 2711, a CDR-L2 comprising the amino acid sequence of SEQ ID NO: 2696, and a CDR-L3 comprising the amino acid sequence of SEQ ID NO: 2706; or
[0597] (e) a CDR-H1 comprising the amino acid sequence of SEQ ID NO: 2692, a CDR-H2 comprising the amino acid sequence of SEQ ID NO: 2693, a CDR-H3 comprising the amino acid sequence of SEQ ID NO: 2694, a CDR-L1 comprising the amino acid sequence of SEQ ID NO: 2695, a CDR-L2 comprising the amino acid sequence of SEQ ID NO: 2696, and a CDR-L3 comprising the amino acid sequence of SEQ ID NO: 2697; or
[0598] (f) a CDR-H1 comprising the amino acid sequence of SEQ ID NO: 2700, a CDR-H2 comprising the amino acid sequence of SEQ ID NO: 2701, a CDR-H3 comprising the amino acid sequence of SEQ ID NO: 2702, a CDR-L1 comprising the amino acid sequence of SEQ ID NO: 2695, a CDR-L2 comprising the amino acid sequence of SEQ ID NO: 2696, and a CDR-L3 comprising the amino acid sequence of SEQ ID NO: 2697; or
[0599] (g) a CDR-H1 comprising the amino acid sequence of SEQ ID NO: 2692, a CDR-H2 comprising the amino acid sequence of SEQ ID NO: 2713, a CDR-H3 comprising the amino acid sequence of SEQ ID NO: 2705, a CDR-L1 comprising the amino acid sequence of SEQ ID NO: 2695, a CDR-L2 comprising the amino acid sequence of SEQ ID NO: 2696, and a CDR-L3 comprising the amino acid sequence of SEQ ID NO: 2697.

[0600] In some embodiments, the antibody or antigen-binding fragment comprises a VH sequence that has at least 85% sequence identity to any one of SEQ ID NOS: 2690, 2698, 2703, 2708, 2709, 2712, 2714, and 2752. In some embodiments, the VH sequence has at least 90% sequence identity to SEQ ID NO: 2703. In some embodiments, the VH sequence has at least 95% sequence identity to SEQ ID NO: 2703. In some embodiments, the VH sequence comprises SEQ ID NO: 2703. In some embodiments, the VH sequence has at least 90% sequence identity to SEQ ID NO: 2712. In some embodiments, the VH sequence has at least 95% sequence identity to SEQ ID NO: 2712. In some embodiments, the VH sequence comprises SEQ ID NO: 2712. In some embodiments, the VH sequence has at least 90% sequence identity to SEQ ID NO: 79. In some embodiments, the VH sequence has at least 95% sequence identity to SEQ ID NO: 79. In some embodiments, the VH sequence comprises SEQ ID NO: 79.

[0601] In some embodiments, the antibody or antigen-binding fragment comprises a VL sequence that has at least 85% sequence identity to any one of SEQ ID NOS: 2691, 2699, 2704, 2708, 2710, and 2741. In some embodiments, the VL sequence has at least 90% sequence identity to SEQ ID NO: 2704. In some embodiments, the VL sequence has at least 95% sequence identity to SEQ ID NO: 2704. In some embodiments, the VL sequence comprises SEQ ID NO: 2704. In some embodiments, the VL sequence has at least 90% sequence identity to SEQ ID NO: 2710. In some embodiments, the VL sequence has at least 95% sequence identity to SEQ ID NO: 2710. In some embodiments, the VL sequence comprises SEQ ID NO: 2710. In some embodiments, the VL sequence has at least 90% sequence identity to SEQ ID NO: 2741. In some embodiments, the VL sequence has at least 95% sequence identity to SEQ ID NO: 2741. In some embodiments, the VL sequence comprises SEQ ID NO: 2741.

[0602] In some embodiments, the antibody or antigen-binding fragment comprises:
[0603] (a) a VH sequence comprising SEQ ID NO: 2703 and a VL sequence comprising SEQ ID NO: 2704; or
[0604] (b) a VH sequence comprising SEQ ID NO: 2707 and a VL sequence comprising SEQ ID NO: 2708; or
[0605] (c) a VH sequence comprising SEQ ID NO: 2709 and a VL sequence comprising SEQ ID NO: 2708; or
[0606] (d) a VH sequence comprising SEQ ID NO: 2707 and a VL sequence comprising SEQ ID NO: 2710; or
[0607] (e) a VH sequence comprising SEQ ID NO: 79 and a VL sequence comprising SEQ ID NO: 2710; or
[0608] (f) a VH sequence comprising SEQ ID NO: 2712 and a VL sequence comprising SEQ ID NO: 2708; or
[0609] (g) a VH sequence comprising SEQ ID NO: 2714 and a VL sequence comprising SEQ ID NO: 2708; or
[0610] (h) a VH sequence comprising SEQ ID NO: 2712 and a VL sequence comprising SEQ ID NO: 2710; or
[0611] (i) a VH sequence comprising SEQ ID NO: 2714 and a VL sequence comprising SEQ ID NO: 2710; or
[0612] (j) a VH sequence comprising SEQ ID NO: 2690 and a VL sequence comprising SEQ ID NO: 2691; or
[0613] (k) a VH sequence comprising SEQ ID NO: 2698 and a VL sequence comprising SEQ ID NO: 2699; or
[0614] (l) a VH sequence comprising SEQ ID NO: 2712 and a VL sequence comprising SEQ ID NO: 2741.

[0615] In some embodiments, an antibody or antigen-binding fragment thereof that specifically binds to TREM2 comprises:
[0616] (a) a CDR-H1 sequence comprising the amino acid sequence of any one of SEQ ID NOS: 2692, 2700, and 2717;
[0617] (b) a CDR-H2 sequence comprising the amino acid sequence of any one of SEQ ID NOS: 2693, 2701, 2713, 2718, 2727, 2729, and 2731;
[0618] (c) a CDR-H3 sequence comprising the amino acid sequence of any one of SEQ ID NOS: 2694, 2702, 2705, and 2719;
[0619] (d) a CDR-L1 sequence comprising the amino acid sequence of any one of SEQ ID NOS: 2695, 2711, and 2720;
[0620] (e) a CDR-L2 sequence comprising the amino acid sequence of any one of SEQ ID NOS: 2696 and 2721; and
[0621] (f) a CDR-L3 sequence comprising the amino acid sequence of any one of SEQ ID NOS: 2697, 2706, and 2722.

[0622] In some embodiments, the antibody or antigen-binding fragment comprises:
[0623] (a) a CDR-H1 comprising the amino acid sequence of SEQ ID NO: 2692, a CDR-H2 comprising the amino acid sequence of SEQ ID NO: 2693, a CDR-H3 comprising the amino acid sequence of SEQ ID NO: 2694, a CDR-L1 comprising the amino acid sequence of SEQ ID NO: 2695, a CDR-L2 comprising the amino acid sequence of SEQ ID NO: 2696, and a CDR-L3 comprising the amino acid sequence of SEQ ID NO: 2697; or
[0624] (b) a CDR-H1 comprising the amino acid sequence of SEQ ID NO: 2692, a CDR-H2 comprising the amino acid sequence of SEQ ID NO: 2693, a CDR-H3 comprising the amino acid sequence of SEQ ID NO: 2705, a CDR-L1 comprising the amino acid sequence of SEQ ID NO: 2695, a CDR-L2 comprising the amino acid sequence of SEQ ID NO: 2696, and a CDR-L3 comprising the amino acid sequence of SEQ ID NO: 2706; or
[0625] (c) a CDR-H1 comprising the amino acid sequence of SEQ ID NO: 2692, a CDR-H2 comprising the amino acid sequence of SEQ ID NO: 2693, a CDR-H3 comprising the amino acid sequence of SEQ ID NO: 2705, a CDR-L1 comprising the amino acid sequence of SEQ ID NO: 2711, a CDR-L2 comprising the amino acid sequence of SEQ ID NO: 2696, and a CDR-L3 comprising the amino acid sequence of SEQ ID NO: 2706; or
[0626] (d) a CDR-H1 comprising the amino acid sequence of SEQ ID NO: 2692, a CDR-H2 comprising the amino acid sequence of SEQ ID NO: 2713, a CDR-H3 comprising the amino acid sequence of SEQ ID NO: 2705, a CDR-L1 comprising the amino acid sequence of SEQ ID NO: 2695, a CDR-L2 comprising the amino acid sequence of SEQ ID NO: 2696, and a CDR-L3 comprising the amino acid sequence of SEQ ID NO: 2706; or
[0627] (e) a CDR-H1 comprising the amino acid sequence of SEQ ID NO: 2692, a CDR-H2 comprising the amino acid sequence of SEQ ID NO: 2713, a CDR-H3 comprising the amino acid sequence of SEQ ID NO: 2705, a CDR-L1 comprising the amino acid sequence of SEQ ID NO: 2711, a CDR-L2 comprising the amino acid sequence of SEQ ID NO: 2696, and a CDR-L3 comprising the amino acid sequence of SEQ ID NO: 2706; or
[0628] (f) a CDR-H1 comprising the amino acid sequence of SEQ ID NO: 2700, a CDR-H2 comprising the amino acid sequence of SEQ ID NO: 2701, a CDR-H3 comprising the amino acid sequence of SEQ ID NO: 2702, a CDR-L1 comprising the amino acid sequence of SEQ ID NO: 2695, a CDR-L2 comprising the amino acid sequence of SEQ ID NO: 2696, and a CDR-L3 comprising the amino acid sequence of SEQ ID NO: 2697;
[0629] (g) a CDR-H1 comprising the amino acid sequence of SEQ ID NO: 2717, a CDR-H2 comprising the amino acid sequence of SEQ ID NO: 2718, a CDR-H3 comprising the amino acid sequence of SEQ ID NO: 2719, a CDR-L1 comprising the amino acid sequence of SEQ ID NO: 2720, a CDR-L2 comprising the amino acid sequence of SEQ ID NO: 2721, and a CDR-L3 comprising the amino acid sequence of SEQ ID NO: 2722; or
[0630] (h) a CDR-H1 comprising the amino acid sequence of SEQ ID NO: 2717, a CDR-H2 comprising the amino acid sequence of SEQ ID NO: 2727, a CDR-H3 comprising the amino acid sequence of SEQ ID NO: 2719, a CDR-L1 comprising the amino acid sequence of SEQ ID NO: 2720, a CDR-L2 comprising the amino acid sequence of SEQ ID NO: 2721, and a CDR-L3 comprising the amino acid sequence of SEQ ID NO: 2722; or
[0631] (i) a CDR-H1 comprising the amino acid sequence of SEQ ID NO: 2717, a CDR-H2 comprising the amino acid sequence of SEQ ID NO: 2729, a CDR-H3 comprising the amino acid sequence of SEQ ID NO: 2719, a CDR-L1 comprising the amino acid sequence of SEQ ID NO: 2720, a CDR-L2 comprising the amino acid sequence of SEQ ID NO: 2721, and a CDR-L3 comprising the amino acid sequence of SEQ ID NO: 2722; or
[0632] (j) a CDR-H1 comprising the amino acid sequence of SEQ ID NO: 2717, a CDR-H2 comprising the amino acid sequence of SEQ ID NO: 2731, a CDR-H3 comprising the amino acid sequence of SEQ ID NO: 2719, a CDR-L1 comprising the amino acid sequence of SEQ ID NO: 2720, a CDR-L2 comprising the amino acid sequence of SEQ ID NO: 2721, and a CDR-L3 comprising the amino acid sequence of SEQ ID NO: 2722; or
[0633] (k) a CDR-H1 comprising the amino acid sequence of SEQ ID NO: 2692, a CDR-H2 comprising the amino acid sequence of SEQ ID NO: 2713, a CDR-H3 comprising the amino acid sequence of SEQ ID NO: 2705, a CDR-L1 comprising the amino acid sequence of SEQ ID NO: 2695, a CDR-L2 comprising the amino acid sequence of SEQ ID NO: 2696, and a CDR-L3 comprising the amino acid sequence of SEQ ID NO: 2697.

[0634] In some embodiments, the antibody or antigen-binding fragment comprises:
[0635] (a) a VH sequence that has at least 85% sequence identity to SEQ ID NO: 2690 and a VL sequence that has at least 85% sequence identity to SEQ ID NO: 2691; or
[0636] (b) a VH sequence that has at least 85% sequence identity to SEQ ID NO: 2698 and a VL sequence that has at least 85% sequence identity to SEQ ID NO: 2699; or
[0637] (c) a VH sequence that has at least 85% sequence identity to SEQ ID NO: 2703 and a VL sequence that has at least 85% sequence identity to SEQ ID NO: 2704; or
[0638] (d) a VH sequence that has at least 85% sequence identity to SEQ ID NO: 2707 and a VL sequence that has at least 85% sequence identity to SEQ ID NO: 2708; or a VH sequence that has at least 85% sequence identity to SEQ ID NO: 2709 and a VL sequence that has at least 85% sequence identity to SEQ ID NO: 2708; or
[0639] (f) a VH sequence that has at least 85% sequence identity to SEQ ID NO: 2707 and a VL sequence that has at least 85% sequence identity to SEQ ID NO: 2710; or
[0640] (g) a VH sequence that has at least 85% sequence identity to SEQ ID NO: 79 and a VL sequence that has at least 85% sequence identity to SEQ ID NO: 2710; or
[0641] (h) a VH sequence that has at least 85% sequence identity to SEQ ID NO: 2712 and a VL sequence that has at least 85% sequence identity to SEQ ID NO: 2708; or
[0642] (i) a VH sequence that has at least 85% sequence identity to SEQ ID NO: 2714 and a VL sequence that has at least 85% sequence identity to SEQ ID NO: 2708; or
[0643] (j) a VH sequence that has at least 85% sequence identity to SEQ ID NO: 2712 and a VL sequence that has at least 85% sequence identity to SEQ ID NO: 2710; or
[0644] (k) a VH sequence that has at least 85% sequence identity to SEQ ID NO: 2714 and a VL sequence that has at least 85% sequence identity to SEQ ID NO: 2710; or
[0645] (l) a VH sequence that has at least 85% sequence identity to SEQ ID NO: 2715 and a VL sequence that has at least 85% sequence identity to SEQ ID NO: 2716; or
[0646] (m) a VH sequence that has at least 85% sequence identity to SEQ ID NO: 2723 and a VL sequence that has at least 85% sequence identity to SEQ ID NO: 2724; or
[0647] (n) a VH sequence that has at least 85% sequence identity to SEQ ID NO: 2725 and a VL sequence that has at least 85% sequence identity to SEQ ID NO: 2724; or (o) a VH sequence that has at least 85% sequence identity to SEQ ID NO: 2726 and a VL sequence that has at least 85% sequence identity to SEQ ID NO: 2724; or (p) a VH sequence that has at least 85% sequence identity to SEQ ID NO: 2728 and a VL sequence that has at least 85% sequence identity to SEQ ID NO: 2724; or (q) a VH sequence that has at least 85% sequence identity to SEQ ID NO: 2730 and a VL sequence that has at least 85% sequence identity to SEQ ID NO: 2724; or (r) a VH sequence that has at least 85% sequence identity to SEQ ID NO: 2732 and a VL sequence that has at least 85% sequence identity to SEQ ID NO: 2724; or (s) a VH sequence that has at least 85% sequence identity to SEQ ID NO: 2733 and a VL sequence that has at least 85% sequence identity to SEQ ID NO: 2724; or (t) a VH sequence that has at least 85% sequence identity to SEQ ID NO: 2734 and a VL sequence that has at least 85% sequence identity to SEQ ID NO: 2724; or (u) a VH sequence that has at least 85% sequence identity to SEQ ID NO: 2712 and a VL sequence that has at least 85% sequence identity to SEQ ID NO: 2741.

[0648] In some embodiments, an antibody or antigen-binding fragment thereof that specifically binds to TREM2 recognizes an epitope that is the same or substantially the same as the epitope recognized by antibody clone selected from the group consisting of: CL0020306, Clone CL0020188, Clone CL0020188-1, Clone CL0020188-2, Clone CL0020188-3, Clone CL0020188-4, Clone CL0020188-5, Clone CL0020188-6, Clone CL0020188-7, Clone CL0020188-8, Clone CL0020307, Clone CL0020123, Clone CL0020 123-1, Clone CL0020123-2, Clone CL0020123-3, Clone CL0020123-4, Clone CL0020123-5, Clone CL0020123-6, Clone CL0020123-7, and Clone CL0020123-8.

[0649] In some embodiments, the antibody or antigen-binding fragment recognizes an epitope that is the same or substantially the same as the epitope recognized by an antibody clone selected from the group consisting of: Clone CL0020123, Clone CL0020123-1, Clone CL0020123-2, Clone CL0020123-3, Clone CL0020123-4, Clone CL0020123-5, Clone CL0020123-6, Clone CL0020123-7, and Clone CL0020123-8. In particular embodiments, the antibody or antigen-binding fragment recognizes one or more of the following epitopes in SEQ ID NO: 1: (i) amino acid residues 55-63 (GEKGPCQRV (SEQ ID NO: 2743)), (ii) amino acids 96-107 (TLRNLQPHDAGL (SEQ ID NO: 2744)), and (iii) amino acid residues 126-129 (VEVL (SEQ ID NO: 2745)). In another aspect, the disclosure features an isolated antibody or antigen-binding fragment thereof that specifically binds to a human TREM2, wherein the antibody or antigen-binding fragment thereof recognizes an epitope comprising or consisting of one or more of the following epitopes in SEQ ID NO: 1: (i) amino acid residues 55-63 (GEKGPCQRV (SEQ ID NO: 2743)), (ii) amino acids 96-107 (TLRNLQPHDAGL (SEQ ID NO: 2744)), and (iii) amino acid residues 126-129 (VEVL (SEQ ID NO: 2745)). In some embodiments, the antibody or antigen-binding fragment recognizes an epitope that is the same or substantially the same as the epitope recognized by an antibody clone selected from the group consisting of: Clone CL0020188, Clone CL0020188-1, Clone CL0020188-2, Clone CL0020188-3, Clone CL0020188-4, Clone CL0020188-5, Clone CL0020188-6, Clone CL0020 188-7, Clone CL0020188-8, Clone CL0020307, and Clone CL0020306. In particular embodiments, the antibody or antigen-binding fragment recognizes amino acid residues 143149 (FPGESES (SEQ ID NO: 2742)) in SEQ ID NO: 1. In another aspect, the disclosure features an isolated antibody or antigen-binding fragment thereof that specifically binds to a human TREM2, wherein the antibody or antigen-binding fragment thereof recognizes an epitope comprising or consisting of amino acid residues 143-149 (FPGESES (SEQ ID NO: 2742)) in SEQ ID NO: 1.

[0650] In some embodiments, an antibody or antigen-binding fragment as disclosed herein decreases levels of soluble TREM2 protein (sTREM2). In some embodiments, an antibody or antigen-binding fragment as disclosed herein binds soluble TREM2 protein (sTREM2) in healthy human CSF or cynomolgus CSF with better potency compared to a reference antibody. In some embodiments, the reference antibody is represented by a combination of sequences selected from the group consisting of: SEQ ID NOS: 2746 and 2747; SEQ ID NOS: 2748 and 2749; and SEQ ID NOS: 2750 and 2751.

[0651] In some embodiments, the antibody is an antibody having a VL, VH, full heavy chain sequence, full light chain sequence, a CDR sequence, or a full sequence disclosed in the “Informal Sequence Listing” Table IX of PCT Patent Application Publication No. WO 2020/172450 A1, which are reproduced below as Table 19.

TABLE 19

| SEQ | | |
|---|---|---|
| ID NO | Sequence | Description |
| 1 | MEPLRLLILLFVTELSGAHNTTVFQGVAGQSLQVSCPYDSMKH | Human TREM2 Protein |
| | WGRRKAWCRQLGEKGPCQRVVSTHNLWLLSFLRRWNGSTAIT | |
| | DDTLGGTLTITLRNLQPHDAGLYQCQSLHGSEADTLRKVLVEVL | |
| | ADPLDHRDAGDLWFPGESESFEDAHVEHSISRSLLEGEIPFPPTSI | |
| | LLLLACIFLIKILAASALWAAAWHGQKPGTHPPSELDCGHDPGY | |
| | QLQTLPGLRDT | |
| 2690 | EVKLLDSGGGLVQAGGSLRLSCAGSGFTFTDFYMSWIRQPPGKA | CL0020306 VH |
| | PEWLGVIRNKANGYTAGYNPSVKGRFTISRDNTQNILYLQMNTL | |
| | RAEDTAIYYCARLSYGFDYWGQGVMVTVSS | |
| 2691 | DIVMTQGALPNPVPSGESASITCQSSKSLLHSNGKTYLNWYLQR | CL0020306 VL |
| | PGQSPQLLIYWMSTRASGVSDRFSGSGSGTDFTLKIS | |
| | SVEAEDVGVYYCQQFLEFPFTFGSGTKLEIK | |
| 2692 | GFTFTDFYMS | CL0020306 CDR-H1; CDR- |
| | | H1 for CL0020188 and |
| | | variants CL0020188-1, |
| | | CL0020188-2, CL0020188-3, |
| | | CL0020188-4, CL0020188-5, |
| | | CL0020188-6, CL0020188-7, |
| | | and CL0020188-8 |
| 2693 | VIRNKANGYTAGYNPSVKG | CL0020306 CDR-H2; CDR- |
| | | H2 for CL0020188 and |
| | | variants CL0020188-1, |
| | | CL0020188-2, CL0020188- |
| | | 3, and CL0020188-4 |
| 2694 | ARLSYGFDY | CL0020306 CDR-H3 |
| 2695 | QSSKSLLHSNGKTYLN | CL0020306 CDR-L1; |
| | | CL0020307 CDR-L1; |
| | | CL0020307-1 CDR-L1; |
| | | CDR-L1 for CL0020188 and |
| | | variants CL0020188-1, |
| | | CL0020188-2, CL0020188- |
| | | 5, and CL0020188-6 |
| 2696 | WMSTRAS | CL0020306 CDR-L2; |
| | | CL0020307 CDR-L2; |
| | | CL0020307-1 CDR-L2; |
| | | CDR-L2 for CL0020188 and |
| | | variants CL0020188-1, |
| | | CL0020188-2, CL0020188-3, |
| | | CL0020188-4, CL0020188-5, |
| | | CL0020188-6, CL0020188-7, |
| | | and CL0020188-8 |
| 2697 | QQFLEFPFT | CL0020306 CDR-L3; |
| | | CL0020307 CDR-L3; |
| | | CL0020307-1 CDR-L3 |
| 2698 | EVKLLESGGGLVQPGGSLRLSCAASGFTFTNFYMSWIRQPPGRA | CL0020307 V_{H} |
| | PEWLGVIRNRPNGYTTDYNPSVKGRFTISRDNTQNILYLQMSTL | |
| | RADDTAFYYCTRLTYGFDYWGQGVMVTVSS | |
| 2699 | DIVMTQGALPNPVPSGESASITCQSSKSLLHSNGKTYLNWYLQR | CL0020307 VL |
| | PGQSPQLLIYWMSTRASGVSDRFSGSGSGTDFTLKIS | |
| | SVEAEVVGVYYCQQFLEFPFTFGSGTKLEIK | |
| 2700 | GFTFTNFYMS | CL0020307 CDR-H1 |
| 2701 | VIRNRPNGYTTDYNPSVKG | CL0020307 CDR-H2 |
| 2702 | TRLTYGFDY | CL0020307 CDR-H3 |
| 2703 | EVKLLDSGGGLVQAGGSLRLSCAGSGFTFTDFYMSWIRQPPGKA | CL0020188 VH |
| | PEWLGVIRNKANGYTAGYNPSVKGRFTISRDNTQNILYLQMNTL | |
| | RAEDTAIYYCARLTYGFDYWGQGVMVTVSS | |
| 2704 | DIVMTQGALPNPVPSGESASITCQSSKSLLHSNGKTYLNWYLQR | CL0020188 VL |
| | PGQSPQLLIYWMSTRASGVSDRFSGSGSGTDFTLKISSVEAEDVG | |
| | VYYCQQFLEYPFTFGSGTKLEIK | |
| 2705 | ARLTYGFDY | CDR-H3 for CL0020188 and |
| | | variants CL0020188-1, |
| | | CL0020188-2, CL0020188-3, |
| 2706 | QQFLEYPFT | CDR-L3 for CL0020188 and |
| | | variants CL0020188-1, |
| | | CL0020188-2, CL0020188-3, |
| 2707 | EVQLVESGGGLVQPGGSLRLSCAASGFTFTDFYMSWVRQAPGK | CL0020188-1 VH; |
| | GLEWVSVIRNKANGYTAGYNPSVKGRFTISRDNSKNTLYLQMN | CL0020188-3 VH |
| | SLRAEDTAVYYCARLTYGFDYWGQGTLVTVSS | |
| 2708 | DIVMTQTPLSLPVTPGEPASISCQSSKSLLHSNGKTYLNWYLQKP | CL0020188-1 VL; |
| | GQSPQLLIYWMSTRASGVPDRFSGSGSGTDFTLKISRVEAEDVG | CL0020188-2 VL; |
| | VYYCQQFLEYPFTFGQGTKVEIK | CL0020188-5 VL; |
| 2709 | EVQLVESGGGLVQPGGSLRLSCAGSGFTFTDFYMSWVRQAPGK | CL0020188-2 VH |
| | GLEWVSVIRNKANGYTAGYNPSVKGRFTISRDNSKNTLYLQMN | |
| | SLRAEDTAVYYCARLTYGFDYWGQGTLVTVSS | |
| 2710 | DIVMTQTPLSLPVTPGEPASISCQSSKSLLHSTGKTYLNWYLQKP | CL0020188-3 VL; |
| | GQSPQLLIYWMSTRASGVPDRFSGSGSGTDFTLKISRVEAEDVG | CL0020188-4 VL; |
| | VYYCQQFLEYPFTFGQGTKVEIK | CL0020188-7 VL; |
| | | CDR-L1 for variants |
| 2711 | QSSKSLLHSTGKTYLN | CL0020188-3, CL0020188-4, |
| | | CL0020188-7, and CL0020188- |
| 2712 | EVQLVESGGGLVQPGGSLRLSCAASGFTFTDFYMSWVRQAPGK | CL0020188-5 VH; |
| | GLEWVSVIRNKANAYTAGYNPSVKGRFTISRDNSKNTLYLQMN | CL0020188-7 VH |
| | SLRAEDTAVYYCARLTYGFDYWGQGTLVTVSS | |
| 2713 | VIRNKANAYTAGYNPSVKG | CDR-H2 for variants |
| | | CL0020188-5, CL0020188-6, |
| | | CL0020188-7, and CL0020188- |
| 2714 | EVQLVESGGGLVQPGGSLRLSCAGSGFTFTDFYMSWVRQAPGK | CL0020188-6 VH; |
| | GPEWLSVIRNKANAYTAGYNPSVKGRFTISRDNSKNTLYLQMN | CL0020188-8 VH |
| | SLRAEDTAVYYCARLTYGFDYWGQGTLVTVSS | |
| 2715 | EVQLQQSGAELVRSGASVKLSCTASGFSIEDFYIHWVKQRPEQG | CL0020123 VH |
| | LEWIGWIDPENGDSKYAPKFQGKATMTADTSSNTAYLHLSSLTS | |
| | EDTAVYYCHADHGNYGSTMDYWGQGTSVTVSS | |
| 2716 | DIQMNQSPSSLSASLGDTVTITCHASQHINVWLSWYQQKPGDHP | CL0020123 VL |
| | KLLIYKASNLHTGVPSRFSGSGSGTGFTLTISSLQPEDIATYYCQQ | |
| | GQTYPRTFGGGTKLEIK | |
| 2717 | GFSIEDFYIH | CDR-H1 for CL0020123 and |
| | | variants CL0020123-1, |
| | | CL0020123-2, CL0020123-3, |
| 2718 | WIDPENGDSKYAPKFQG | DR-H2 for CL0020123 and |
| | | variants CL0020123-1 and |
| | | CL0020123-2 |
| 2719 | HADHGNYGSTMDY | CDR-H3 for CL0020123 and |
| | | variants CL0020123-1, |
| | | CL0020123-2, CL0020123-3, |
| 2720 | HASQHINVWLS | CDR-L1 for CL0020123 and |
| | | variants CL0020123-1, |
| | | CL0020123-2, CL0020123-3, |
| 2721 | KASNLHT | CDR-L2 for CL0020123 and |
| | | variants CL0020123-1, |
| | | CL0020123-2, CL0020123-3, |
| 2722 | QQGQTYPRT | CDR-L3 for CL0020123 and |
| | | variants CL0020123-1, |
| | | CL0020123-2, CL0020123-3, |
| 2723 | QVQLVQSGAEVKKPGASVKVSCKASGFSIEDFYIHWVRQAPGQ | CL0020123-1 VH |
| | GLEWMGWIDPENGDSKYAPKFQGRATITADTSTSTAYMELSSL | |
| | RSEDTAVYYCHADHGNYGSTMDYWGQGTLVTVSS | |
| 2724 | DIQMTQSPSSLSASVGDRVTITCHASQHINVWLSWYQQKPGKAP | CL0020123-1 VL; |
| | KLLIYKASNLHTGVPSRFSGSGSGTDFTLTISSLQPEDFATYYCQ | CL0020123-2 VL; |
| | QGQTYPRTFGQGTKVEIK | CL0020123-3 VL; |
| 2725 | QVQLVQSGAEVKKPGASVKVSCKASGFSIEDFYIHWVRQAPGQ | CL0020123-2 VH |
| | GLEWMGWIDPENGDSKYAPKFQGRVTITADTSTSTAYMELSSL | |
| | RSEDTAVYYCHADHGNYGSTMDYWGQGTLVTVSS | |
| 2726 | QVQLVQSGAEVKKPGASVKVSCKASGFSIEDFYIHWVRQAPGQ | CL0020123-3 VH |
| | GLEWMGWIDPEQGDSKYAPKFQGRATITADTSTSTAYMELSSL | |
| | RSEDTAVYYCHADHGNYGSTMDYWGQGTLVTVSS | |
| 2727 | WIDPEQGDSKYAPKFQG | CDR-H2 for variants |
| | | CL0020123-3 and |
| | | CL0020123-6 |
| 2728 | QVQLVQSGAEVKKPGASVKVSCKASGFSIEDFYIHWVRQAPGQ | CL0020123-4 VH |
| | GLEWMGWIDPENGESKYAPKFQGRATITADTSTSTAYMELSSLR | |
| | SEDTAVYYCHADHGNYGSTMDYWGQGTLVTVSS | |
| 2729 | WIDPENGESKYAPKFQG | CDR-H2 for variants |
| | | CL0020123-4 and |
| | | CL0020123-7 |
| 2730 | QVQLVQSGAEVKKPGASVKVSCKASGFSIEDFYIHWVRQAPGQ | CL0020123-5 VH |
| | GLEWMGWIDPEQGESKYAPKFQGRATITADTSTSTAYMELSSLR | |
| | SEDTAVYYCHADHGNYGSTMDYWGQGTLVTVSS | |
| 2731 | WIDPEQGESKYAPKFQG | CDR-H2 for variants |
| | | CL0020123-5 and |
| | | CL0020123-8 |
| 2732 | QVQLVQSGAEVKKPGASVKVSCKASGFSIEDFYIHWVRQAPGQ | CL0020123-6 VH |
| | GLEWMGWIDPEQGDSKYAPKFQGRVTITADTSTSTAYMELSSL | |
| | RSEDTAVYYCHADHGNYGSTMDYWGQGTLVTVSS | |
| 2733 | QVQLVQSGAEVKKPGASVKVSCKASGFSIEDFYIHWVRQAPGQ | CL0020123-7 VH |
| | GLEWMGWIDPENGESKYAPKFQGRVTITADTSTSTAYMELSSLR | |
| | SEDTAVYYCHADHGNYGSTMDYWGQGTLVTVSS | |
| 2734 | QVQLVQSGAEVKKPGASVKVSCKASGFSIEDFYIHWVRQAPGQ | CL0020123-8 VH |
| | GLEWMGWIDPEQGESKYAPKFQGRVTITADTSTSTAYMELSSLR | |
| | SEDTAVYYCHADHGNYGSTMDYWGQGTLVTVSS | |
| 2735 | W-I-D-P-E-β6-G-β8-S-K-Y-A-P-K-F-Q-G, wherein | CDR-H2 consensus sequence |
| | (β6 is N or Q and (β8 is D or E | |
| 2736 | G-F-T-F-T-α6-F-Y-M-S, wherein α6 is D or N | CDR-H1 consensus sequence |
| 2737 | V-I-R-N-β5-β6-N-β8-Y-T-β11-β12-Y-N-P-S-V-K-G, | CDR-H2 consensus sequence |
| | wherein β5 is K or R; β6 is A or P; β8 is G or A; | |
| | β11 is A or T; and β12 is G or D | |
| 2738 | γ1-R-L-γ4-Y-G-F-D-Y, wherein γ1 is A or T; and | CDR-H3 consensus sequence |
| | γ4 is T or S | |
| 2739 | Q-S-S-K-S-L-L-H-S-δ10-G-K-T-Y-L-N, wherein δ10 | CDR-L1 consensus sequence |
| | is N or T | |
| 2740 | Q-Q-F-L-E-ϕ6-P-F-T, wherein ϕ6 is Y or F | CDR-L3 consensus sequence |
| 2741 | DIVMTQSPDSLAVSLGERATINCQSSKSLLHSNGKTYLNWYQQK | CL0020307-1 VL |
| | PGQPPKLLIYWMSTRASGVPDRFSGSGSGTDFTLTISSLQAEDVA | |
| | VYYCQQFLEFPFTFGQGTKVEIK | |
| 2742 | FPGESES | TREM2 epitope |
| 2743 | GEKGPCQRV | TREM2 epitope |
| 2744 | TLRNLQPHDAGL | TREM2 epitope |
| 2745 | VEVL | TREM2 epitope |
| 2746 | DIQMTQSPSSVSASVGDRVTITCRASQGISNWLAWYQQKPGKAP | Reference antibody #1 VL |
| | KLLIYAASSLQVGVPLRFSGSGSGTDFTLTISSLQPEDFATYYCQ | |
| | QADSFPRNFGQGTKLEIK | |
| 2747 | EVQLVQSGAEVKKPGESLKISCKGSGHSFTNYWIAWVRQMPGK | Reference antibody #1 VH |
| | GLEWMGIIYPGDSDTRYSPSFQGQVTISADKSISTAYLQWSSLKA | |
| | SDTAVYFCARQRTFYYDSSGYFDYWGQGTLVTVSS | |
| 2748 | DIQMTQSPSSVSASVGDRVTITCRASQGISSWLAWYQQKPGKAP | Reference antibody #2 VL |
| | KLLIYAASSLQNGVPSRFSGSGSGTDFTLTISSLQPEDFATYFCQQ | |
| | ADSFPRTFGQGTKLEIK | |
| 2749 | EVQLVQSGAEVKKPGESLKISCKGSGYSFTSYWIAWVRQMPGK | Reference antibody #2 VH |
| | GLEWMGIIYPGDSDTRYSPSFQGQVTISADKSISTAYLQWSSLKA | |
| | SDTAMYFCARQRTFYYDSSDYFDYWGQGTLVTVSS | |
| 2750 | DVVMTQSPDSLAVSLGERATINCRSSQSLVHSNRYTYLHWYQQ | Reference antibody #3 VL |
| | KPGQSPKLLIYKVSNRFSGVPDRFSGSGSGTDFTLKISRVEAEDV | |
| | GVYYCSQSTRVPYTFGQGTKLEIK | |
| 2751 | QVQLVQSGAEVKKPGASVKVSCKASGYAFSSQWMNWVRQAP | Reference antibody #3 VH |
| | GQRLEWIGRIYPGGGDTNYAGKFQGRVTITADTSASTAYMELSS | |
| | LRSEDTAVYYCARLLRNQPGESYAMDYWGQGTLVTVSS | |
| 2752 | EVQLVESGGGLVQPGGSLRLSCAGSGFTFTDFYMSWVRQAPGK | CL0020188-4 VH |
| | GPEWLSVIRNKANGYTAGYNPSVKGRFTISRDNSKNTLYLQMN | |
| | SLRAEDTAVYYCARLTYGFDYWGQGTLVTVSS | |

[0652] In some embodiments, each of the light chain variable regions and each of the heavy chain variable regions disclosed in Table 19 as well as specific combinations thereof and other embodiments of the anti-TREM2 antibody described in the '450 application and herein may be attached to the light chain constant regions (Table 4) and heavy chain constant regions (Table 5) to form complete antibody light and heavy chains, respectively, as further discussed below. Further, each of the generated heavy and light chain sequences may be combined to form a complete antibody structure. It should be understood that the heavy chain and light chain variable regions provided herein can also be attached to other constant domains having different sequences than the exemplary sequences listed herein.

M. PCT Patent Application Publication No. WO2021/101823A1

[0653] In some embodiments, the TREM2 agonist is an antibody, or an antigen-binding fragment thereof, as described in PCT Patent Application Publication No. WO2021/101823A1 (“the '823 application”), which is incorporated by reference herein, in its entirety.

[0654] In some embodiments, the antibody or antigen-binding fragment thereof comprises:
[0655] (a) a CDR-H1 sequence comprising the sequence of GFSFNTYWIG (SEQ ID NO: 2753);
[0656] (b) a CDR-H2 sequence comprising the sequence of IIYPGDQDIRYSPSFQG (SEQ ID NO: 2754;
[0657] (c) a CDR-H3 sequence comprising the sequence of ARYGRYIYGYGGYHGMDV (SEQ ID NO: 2755;
[0658] (d) CDR-L1 sequence comprising the sequence of RASQAIRDDLG (SEQ ID NO: 2756);
[0659] (e) a CDR-L2 sequence comprising the sequence of YAASSLQS (SEQ ID NO: 2757); and
[0660] (f) a CDR-L3 sequence comprising the sequence of LQNYNYPHT (SEQ ID NO: 2758).

[0661] In some embodiments, the antibody or antigen-binding fragment comprises a CDR-H1 comprising the amino acid sequence of SEQ ID NO: 2753, a CDR-H2 comprising the amino acid sequence of SEQ ID NO: 2754, a CDR-H3 comprising the amino acid sequence of SEQ ID NO: 2755, a CDR-L1 comprising the amino acid sequence of SEQ ID NO: 2756, a CDR-L2 comprising the amino acid sequence of SEQ ID NO: 2757, and a CDR-L3 comprising the amino acid sequence of SEQ ID NO: 2758

[0662] In some embodiments, the antibody or antigen-binding fragment comprises a V_{H} sequence that has at least 85% sequence identity to SEQ ID NO: 2759. In some embodiments, the V_{H} sequence has at least 90% sequence identity to SEQ ID NO: 2759. In some embodiments, the V_{H} sequence has at least 95% sequence identity to SEQ ID NO: 2759. In some embodiments, the V_{H} sequence comprises SEQ ID NO: 2759.

[0663] In some embodiments, the antibody or antigen-binding fragment comprises a V_{L} sequence that has at least 85% sequence identity to SEQ ID NO: 2760. In some embodiments, the V_{L} sequence has at least 90% sequence identity to SEQ ID NO: 2760. In some embodiments, the V_{L} sequence has at least 95% sequence identity to SEQ ID NO: 2760. In some embodiments, the V_{L} sequence comprises SEQ ID NO: 2760.

[0664] In some embodiments, the antibody or antigen-binding fragment comprises a VH sequence comprising SEQ ID NO: 2759 and a V_{L} sequence comprising SEQ ID NO: 2760.

[0665] In some embodiments, an antibody or antigen-binding fragment thereof that specifically binds to TREM2 recognizes an epitope that is the same or substantially the same as the epitope recognized by Antibody 1 of the '823 application.

[0666] In some embodiments, the antibody or antigen-binding fragment recognizes an epitope present on the extracellular domain of a human TREM2. In particular embodiments, the antibody or antigen-binding fragment recognizes an epitope present on the extracellular domain of a human TREM2 in SEQ ID NO: 2763. In some embodiments, the antibody or antigen-binding fragment recognizes an epitope present on the extracellular domain of a mouse TREM2. In particular embodiments, the antibody or antigen-binding fragment recognizes an epitope present on the extracellular domain of a mouse TREM2 in SEQ ID NO: 2764. In some embodiments, the antibody or antigen-binding fragment recognizes an epitope present on the extracellular domain of a rat TREM2. In particular embodiments, the antibody or antigen-binding fragment recognizes an epitope present on the extracellular domain of a rat TREM2 in SEQ ID NO: 2765. In some embodiments, the antibody or antigen-binding fragment recognizes an epitope present on the extracellular domain of a rabbit TREM2. In particular embodiments, the antibody or antigen-binding fragment recognizes an epitope present on the extracellular domain of a rabbit TREM2 in SEQ ID NO: 2766. In some embodiments, the antibody or antigen-binding fragment recognizes an epitope present on the extracellular domain of a cynomolgus monkey TREM2. In particular embodiments, the antibody or antigen-binding fragment recognizes an epitope present on the extracellular domain of a cynomolgus monkey TREM2 in SEQ ID NO: 2767.

[0667] In some embodiments, the antibody is an antibody having a VL, VH, full heavy chain sequence, full light chain sequence, a CDR sequence, or a full sequence disclosed in the “SEQUENCE” Table of PCT Patent Application Publication No. WO2021/101823A1, which are reproduced below as Table 20.

TABLE 20

| SEQ | | |
|---|---|---|
| ID NO | Sequence | Description |
| 2753 | GFSFNTYWIG | ’823 Antibody 1 CDR-H1 |
| 2754 | IIYPGDQDIRYSPSFQG | ’823 Antibody 1 CDR-H2 |
| 2755 | ARYGRYIYGYGGYHGMDV | ’823 Antibody 1 CDR-H3 |
| 2756 | RASQAIRDDLG | ’823 Antibody 1 CDR-L1 |
| 2757 | YAASSLQS | ’823 Antibody 1 CDR-L2 |
| 2758 | LQNYNYPHT | ’823 Antibody 1 CDR-L3 |
| 2759 | EVQLVQSGAEVKKPGESLKISCKGSGFSFNTYWIGWVRQMPGKG | ’823 Antibody 1 VH |
| | LEWMGIIYPGDQDIRYSPSFQGQVTISADKSISTAYLQWSSLKASD | |
| | TAMYYCARYGRYIYGYGGYHGMDVWGQGTTVTVSS | |
| 2760 | DIQMTQSPSSLSASVGDRVTITCRASQAIRDDLGWYQQKPGKAPK | ’823 Antibody 1 VL |
| | LLIYAASSLQSGVPSRFSGSGSGTDFTLTISSLQPEDFATYYCLQNY | |
| | NYPHTFGQGTKLEIK | |
| 2761 | EVQLVQSGAEVKKPGESLKISCKGSGFSFNTYWIGWVRQMPGKG | ’823 Antibody 1 Heavy |
| | LEWMGIIYPGDQDIRYSPSFQGQVTISADKSISTAYLQWSSLKASD | Chain |
| | TAMYYCARYGRYIYGYGGYHGMDVWGQGTTVTVSSASTKGPS | |
| | VFPLAPCSRSTSESTAALGCLVKDYFPEPVTVSWNSGALTSGVHT | |
| | FPAVLQSSGLYSLSSVVTVPSSSLGTKTYTCNVDHKPSNTKVDKR | |
| | VESKYGPPCPPCPAPEAAGGPSVFLFPPKPKDTLMISRTPEVTCVV | |
| | VDVSQEDPEVQFNWYVDGVEVHNAKTKPREEQFNSTYRVVSVL | |
| | TVLHQDWLNGKEYKCKVSNKGLPSSIEKTISKAKGQPREPQVYT | |
| | LPPSQEEMTKNQVSLTCLVKGFYPSDIAVEWESNGQPENNYKTTP | |
| | PVLDSDGSFFLYSRLTVDKSRWQEGNVFSCSVMHEALHNHYTQK | |
| | SLSLSLG | |
| 2762 | DIQMTQSPSSLSASVGDRVTITCRASQAIRDDLGWYQQKPGKAP | ’823 Antibody 1 Light |
| | KLLIYAASSLQSGVPSRFSGSGSGTDFTLTISSLQPEDFATYYCLQ | Chain |
| | NYNYPHTFGQGTKLEIKRTVAAPSVFIFPPSDEQLKSGTASVVCL | |
| | LNNFYPREAKVQWKVDNALQSGNSQESVTEQDSKDSTYSLSST | |
| | LTLSKADYEKHKVYACEVTHQGLSSPVTKSFNRGEC | |
| 2763 | HNTTVFQGVAGQSLQVSCPYDSMKHWGRRKAWCRQLGEKGP | Human TREM2 ECD-His |
| | CQRVVSTHNLWLLSFLRRWNGSTAITDDTLGGTLTITLRNLQPH | |
| | DAGLYQCQSLHGSEADTLRKVLVEVLADPLDHRDAGDLWFPG | |
| | ESESFEDAHVEHSISRSLLEGEIPFPPTSHHHHHH | |
| 2764 | LNTTVLQGMAGQSLRVSCTYDALKHWGRRKAWCRQLGEEGPC | Mouse TREM2 ECD-His |
| | QRVVSTHGVWLLAFLKKRNGSTVIADDTLAGTVTITLKNLQAGD | |
| | AGLYQCQSLRGREAEVLQKVLVEVLEDPLDDQDAGDLWVPEESS | |
| | SFEGAQVEHSTSRNQETSFPPTSHHHHHH | |
| 2765 | NTTVFQGVAGQSLRVSCPYDSATHWGRRKAWCRQLGEEGPCER | Rat TREM2 ECD-His |
| | VVSTHSWWLLSFLKRRNGSTAITDDALGGTLTVTLRDLQAQDAG | |
| | VYQCQSLQGREASTLQKILVEVL1EPLEHEHAGDFWVPEESGSFE | |
| | DPPVERSSSRSPSEGEPSFPPASGGGGQHHHHHH | |
| 2766 | NTTVLQGVAGQSLRVSCTYDALRHWGRRKAWCRQLAEEGPCQR | Rabbit TREM2 ECD-His |
| | VVSTHGVWLLAFLRKQNGSTVITDDTLAGTVTITLRNLQAGDAG | |
| | LYQCQSLRGREAEVLQKVVVEVLEDPLDDQDAGDLWVPEESESF | |
| | EGAQVEHSTSRSQSGGGGQHHHHHH | |
| 2767 | HNTTVFQGVEGQSLQVSCPYDSMKHWGRRKAWCRQLGEKGPC | Cynomolgus monkey TREM2 |
| | QRVVSTHNLWLLSFLRRRNGSTAITDDTLGGTLTITLRNLQPHDA | ECD-His |
| | GFYQCQSLHGSEADTLRKVLVEVLADPLDHRDAGDLWVPGESE | |
| | SFEDAHVEHSISRPSQGSHLPSCLSKEGGGGQHHHHHH | |

[0668] In some embodiments, each of the light chain variable regions and each of the heavy chain variable regions disclosed in Table 20 as well as specific combinations thereof and other embodiments of the anti-TREM2 antibody described in the '823 application and herein may be attached to the light chain constant regions (Table 4) and heavy chain constant regions (Table 5) to form complete antibody light and heavy chains, respectively, as further discussed below. Further, each of the generated heavy and light chain sequences may be combined to form a complete antibody structure. It should be understood that the heavy chain and light chain variable regions provided herein can also be attached to other constant domains having different sequences than the exemplary sequences listed herein.

### Antibody Constant Domains and Engineered Constant Regions

[0669] In some embodiments, any of the antigen binding agents, can have a constant domain on the light chain and/or the heavy chain of any origin. The term “constant region” as used herein refers to all domains of an antibody other than the variable region. The constant domain can be that of rodent, primate or other mammals. In some embodiments, the constant domain is of human origin. Accordingly, in some embodiments, any of the antigen binding agents described herein can have a human constant region, some of which are described above.

[0670] In some embodiments, a human constant region is, for example, a human light chain constant region or a human constant heavy chain region.

[0671] The term “light chain” or “immunoglobulin light chain” refers to a polypeptide comprising, from amino terminus to carboxyl terminus, a single immunoglobulin light chain variable region (VL) and a single immunoglobulin light chain constant domain (CL). The immunoglobulin light chain constant domain (CL) can be a human kappa (κ) or human lambda (k) constant domain.

[0672] The term “heavy chain” or “immunoglobulin heavy chain” refers to a polypeptide comprising, from amino terminus to carboxyl terminus, a single immunoglobulin heavy chain variable region (VH), an immunoglobulin heavy chain constant domain 1 (CH1), an immunoglobulin hinge region, an immunoglobulin heavy chain constant domain 2 (CH2), an immunoglobulin heavy chain constant domain 3 (CH3), and optionally an immunoglobulin heavy chain constant domain 4 (CH4). Heavy chains are classified as mu (μ), delta (Δ), gamma (γ), alpha (α), and epsilon (ε), and define the antibody's isotype as IgM, IgD, IgG, IgA, and IgE, respectively. The IgG-class and IgA-class antibodies are further divided into subclasses, namely, IgG1, IgG2, IgG3, and IgG4, and IgA1 and IgA2, respectively. The heavy chains in IgG, IgA, and IgD antibodies have three domains (CH1, CH2, and CH3), whereas the heavy chains in IgM and IgE antibodies have four domains (CH1, CH2, CH3, and CH4). The immunoglobulin heavy chain constant domains can be from any immunoglobulin isotype, including subtypes. The antibody chains are linked together via inter-polypeptide disulfide bonds between the CL domain and the CH1 domain (i.e. between the light and heavy chain) and between the hinge regions of the antibody heavy chains.

[0673] In some embodiments, the human light chain constant region comprises a human kappa or human lambda constant region. In some embodiments, the antigen binding agents based on any light chain variable region or CDRs of a light chain variable region described herein includes a human light chain constant region, such as a kappa or lambda constant region sequences, which are found in all five antibody isotypes. Examples of human immunoglobulin light chain constant region sequences are shown in the following table.

TABLE 4
Exemplary Human Immunoglobulin Light Chain Constant Regions

| | SEQ | |
|---|---|---|
| Designation | ID NO: | CL Domain Amino Acid Sequence |
| Human | 191 | GQPKANPTVTLFPPSSEELQANKATLVCLISDFYPGAVTVAWKADGSPVKAG |
| lambda v1 | | VETTKPSKQSNNKYAASSYLSLTPEQWKSHRSYSCQVTHEGSTVEKTVAPTE |
| | | CS |
| Human | 192 | GQPKAAPSVTLFPPSSEELQANKATLVCLISDFYPGAVTVAWKADSSPVKAG |
| lambda v2 | | VETTTPSKQSNNKYAASSYLSLTPEQWKSHRSYSCQVTHEGSTVEKTVAPTE |
| | | CS |
| Human | 193 | QPKAAPSVILFPPSSEELQANKATLVCLISDFYPGAVIVAWKADSSPVKAGV |
| lambda v3 | | ETTTPSKQSNNKYAASSYLSLTPEQWKSHRSYSCQVTHEGSTVEKTVAPTEC |
| | | S |
| Human | 194 | GQPKAAPSVTLFPPSSEELQANKATLVCLISDFYPGAVTVAWKADSSPVKAG |
| lambda v4 | | VETTTPSKQSNNKYAASSYLSLTPEQWKSHKSYSCQVTHEGSTVEKTVAPTE |
| | | CS |
| Human | 195 | GQPKAAPSVTLFPPSSEELQANKATLVCLVSDFYPGAVTVAWKADGSPVKVG |
| lambda v5 | | VETTKPSKQSNNKYAASSYLSLTPEQWKSHRSYSCRVTHEGSTVEKTVAPAE |
| | | CS |
| Human | 196 | TVAAPSVFIFPPSDEQLKSGTASVVCLLNNFYPREAKVQWKVDNALQSGNSQ |
| kappa v1 | | ESVTEQDSKDSTYSLSSTLTLSKADYEKHKVYACEVTHQGLSSPVTKSFNRG |
| | | EC |
| Human | 197 | RTVAAPSVFIFPPSDEQLKSGTASVVCLLNNFYPREAKVQWKVDNALQSGNS |
| kappa v2 | | QESVTEQDSKDSTYSLSSTLTLSKADYEKHKVYACEVTHQGLSSPVTKSFNR |
| | | GEC |

[0674] In some embodiments, a human constant region comprises at least one or all of the following: a human CH1, human Hinge, human CH2, and CH3 domain. In some embodiments, the heavy chain constant region comprises an Fc region, where the Fc portion is a human IgG_{I}, IgG₂, IgG₃, IgG₄ or IgM isotype. The term “Fc region” refers to the C-terminal region of an immunoglobulin heavy chain which may be generated by papain digestion of an intact antibody. The Fc region of an immunoglobulin generally comprises two constant domains, a CH2 domain and a CH3 domain, and optionally comprises a CH4 domain. In certain embodiments, the Fc region is an Fc region from an IgG1, IgG2, IgG3, or IgG4 immunoglobulin. In some embodiments, the Fc region comprises CH2 and CH3 domains from a human IgG1 or human IgG2 immunoglobulin. The Fc region may retain effector function, such as Clq binding, complement-dependent cytotoxicity (CDC), Fc receptor binding, antibody-dependent cell-mediated cytotoxicity (ADCC), and phagocytosis. In other embodiments, the Fc region may be modified to reduce or eliminate effector function as described in further detail below.

[0675] In some embodiments, the antigen binding agents based on any heavy chain variable region or CDRs of a heavy chain variable region described herein includes a human heavy chain constant region, for example a human constant region comprising at least one or all of a human CH1, human Hinge, human CH2, and CH3 domain. In some embodiments, the antigen binding agents based on any heavy chain variable region or CDRs of a heavy chain variable region described herein includes an Fc region, where the Fc region is a human IgG₁, IgG₂, IgG₃, IgG₄ or IgM isotype. Examples of human IgG1, IgG2, and IgG4 heavy chain constant region sequences are shown below in Table 5.

TABLE 5
Exemplary Human Immunoglobulin Heavy Chain Constant Regions

| | SEQ | |
|---|---|---|
| Ig isotype | ID NO: | Heavy Chain Constant Region Amino Acid Sequence |
| Human IgG1z | 198 | ASTKGPSVFPLAPSSKSTSGGTAALGCLVKDYFPEPVTVSWNSGALTSGV |
| | | HTFPAVLQSSGLYSLSSVVTVPSSSLGTQTYICNVNHKPSNTKVDKKVEP |
| | | KSCDKTHTCPPCPAPELLGGPSVFLFPPKPKDTLMISRTPEVTCVVVDVS |
| | | HEDPEVKFNWYVDGVEVHNAKTKPREEQYNSTYRVVSVLTVLHQDWLNGK |
| | | EYKCKVSNKALPAPIEKTISKAKGQPREPQVYTLPPSREEMTKNQVSLIC |
| | | LVKGFYPSDIAVEWESNGQPENNYKTTPPVLDSDGSFFLYSKLTVDKSRW |
| | | QQGNVFSCSVMHEALHNHYTQKSLSLSPGK |
| Human | 199 | ASTKGPSVFPLAPSSKSTSGGTAALGCLVKDYFPEPVTVSWNSGALTSGV |
| IgG1za | | HTFPAVLQSSGLYSLSSVVTVPSSSLGTQTYICNVNHKPSNTKVDKKVEP |
| | | KSCDKTHTCPPCPAPELLGGPSVFLFPPKPKDTLMISRTPEVTCVVVDVS |
| | | HEDPEVKFNWYVDGVEVHNAKTKPREEQYNSTYRVVSVLTVLHQDWLNGK |
| | | EYKCKVSNKALPAPIEKTISKAKGQPREPQVYTLPPSRDELTKNQVSLIC |
| | | LVKGFYPSDIAVEWESNGQPENNYKTTPPVLDSDGSFFLYSKLTVDKSRW |
| | | QQGNVFSCSVMHEALHNHYTQKSLSLSPGK |
| Human IgG1f | 200 | ASTKGPSVFPLAPSSKSTSGGTAALGCLVKDYFPEPVTVSWNSGALTSGV |
| | | HTFPAVLQSSGLYSLSSVVTVPSSSLGTQTYICNVNHKPSNTKVDKRVEP |
| | | KSCDKTHTCPPCPAPELLGGPSVFLFPPKPKDTLMISRTPEVTCVVVDVS |
| | | HEDPEVKFNWYVDGVEVHNAKTKPREEQYNSTYRVVSVLTVLHQDWLNGK |
| | | EYKCKVSNKALPAPIEKTISKAKGQPREPQVYTLPPSREEMTKNQVSLIC |
| | | LVKGFYPSDIAVEWESNGQPENNYKTTPPVLDSDGSFFLYSKLTVDKSRW |
| | | QQGNVFSCSVMHEALHNHYTQKSLSLSPGK |
| Human | 201 | ASTKGPSVFPLAPSSKSTSGGTAALGCLVKDYFPEPVTVSWNSGALTSGV |
| IgG1fa | | HTFPAVLQSSGLYSLSSVVTVPSSSLGTQTYICNVNHKPSNTKVDKRVEP |
| | | KSCDKTHTCPPCPAPELLGGPSVFLFPPKPKDTLMISRTPEVTCVVVDVS |
| | | HEDPEVKFNWYVDGVEVHNAKTKPREEQYNSTYRVVSVLTVLHQDWLNGK |
| | | EYKCKVSNKALPAPIEKTISKAKGQPREPQVYTLPPSRDELTKNQVSLIC |
| | | LVKGFYPSDIAVEWESNGQPENNYKTTPPVLDSDGSFFLYSKLTVDKSRW |
| | | QQGNVFSCSVMHEALHNHYTQKSLSLSPGK |
| Human IgG1z | 202 | ASTKGPSVFPLAPSSKSTSGGTAALGCLVKDYFPEPVTVSWNSGALTSGV |
| aglycosylated | | HTFPAVLQSSGLYSLSSVVTVPSSSLGTQTYICNVNHKPSNTKVDKKVEP |
| v1 | | KSCDKTHTCPPCPAPELLGGPSVFLFPPKPKDTLMISRTPEVTCVVVDVS |
| | | HEDPEVKFNWYVDGVEVHNAKTKPREEQYGSTYRVVSVLTVLHQDWLNGK |
| | | EYKCKVSNKALPAPIEKTISKAKGQPREPQVYTLPPSREEMTKNQVSLIC |
| | | LVKGFYPSDIAVEWESNGQPENNYKTTPPVLDSDGSFFLYSKLTVDKSRW |
| | | QQGNVFSCSVMHEALHNHYTQKSLSLSPGK |
| Human IgG1z | 203 | ASTKGPSVFPLAPSSKSTSGGTAALGCLVKDYFPEPVTVSWNSGALTSGV |
| aglycosylated | | HTFPAVLQSSGLYSLSSVVTVPSSSLGTQTYICNVNHKPSNTKVDKKVEP |
| v2 | | KSCDKTHTCPPCPAPELLGGPSVFLFPPKPKDTLMISRTPEVTCVVVDVS |
| | | HEDPEVKFNWYVDGVEVHNAKTKPCEEQYGSTYRCVSVLTVLHQDWLNGK |
| | | EYKCKVSNKALPAPIEKTISKAKGQPREPQVYTLPPSREEMTKNQVSLIC |
| | | LVKGFYPSDIAVEWESNGQPENNYKTTPPVLDSDGSFFLYSKLTVDKSRW |
| | | QQGNVFSCSVMHEALHNHYTQKSLSLSPGK |
| Human IgG2 | 204 | ASTKGPSVFPLAPCSRSTSESTAALGCLVKDYFPEPVTVSWNSGALTSGV |
| | | HTFPAVLQSSGLYSLSSVVTVPSSNFGTQTYTCNVDHKPSNTKVDKTVER |
| | | KCCVECPPCPAPPVAGPSVFLFPPKPKDTLMISRTPEVTCVVVDVSHEDP |
| | | EVQFNWYVDGVEVHNAKTKPREEQFNSTFRVVSVLTVVHQDWLNGKEYKC |
| | | KVSNKGLPAPIEKTISKTKGQPREPQVYTLPPSREEMTKNQVSLTCLVKG |
| | | FYPSDIAVEWESNGQPENNYKTTPPMLDSDGSFFLYSKLTVDKSRWQQGN |
| | | VFSCSVMHEALHNHYTQKSLSLSPGK |
| Human IgG4 | 205 | ASTKGPSVFPLAPSSKSTSGGTAALGCLVKDYFPEPVTVSWNSGALTSGV |
| | | HTFPAVLQSSGLYSLSSVVTVPSSSLGTQTYICNVNHKPSNTKVDKKVEP |
| | | KSCDKTHTCPPCPAPELLGGPSVFLFPPKPKDTLMISRTPEVTCVVVDVS |
| | | HEDPEVKFNWYVDGVEVHNAKTKPCEEQYGSTYRCVSVLTVLHQDWLNGK |
| | | EYKCKVSNKALPAPIEKTISKAKGQPREPQVYTLPPSREEMTKNQVSLIC |
| | | LVKGFYPSDIAVEWESNGQPENNYKTTPPVLDSDGSFFLYSKLTVDKSRW |
| | | QQGNVFSCSVMHEALHNHYTQKSLSLSPGK |

[0676] In some embodiments, the heavy chain constant region, particularly the Fc region, is an engineered heavy chain constant region. In some embodiments, the antigen binding proteins, e.g. monoclonal antibodies, comprise one or more amino acid substitutions in the Fc region to enhance effector function, including ADCC activity, CDC activity, ADCP activity, and/or the clearance or half-life of the antigen binding protein. Exemplary amino acid substitutions (according to EU numbering scheme) that can enhance effector function include, but are not limited to, E233L, L234I, L234Y, L235S, G236A, S239D, F243L, F243V, P247I, D280H, K290S, K290E, K290N, K290Y, R292P, E294L, Y296W, S298A, S298D, S298V, S298G, S298T, T299A, Y300L, V3051, Q311M, K326A, K326E, K326W, A330S, A330L, A330M, A330F, I332E, D333A, E333S, E333A, K334A, K334V, A339D, A339Q, P396L, or combinations of any of the foregoing.

[0677] In some embodiments, the TREM2 antigen binding proteins (e.g. monoclonal antibodies) comprise one or more amino acid substitutions in a heavy chain constant region to reduce effector function. Exemplary amino acid substitutions (according to EU numbering scheme) that can reduce effector function include, but are not limited to, C220S, C226S, C229S, E233P, L234A, L234V, V234A, L234F, L235A, L235E, G237A, P238S, S267E, H268Q, N297A, N297G, N297Q, V309L, E318A, L328F, A330S, A331S, P331S or combinations of any of the foregoing.

[0678] In some embodiments, the TREM2 agonist antigen binding proteins comprise one or more amino acid substitutions that affect the level or type of glycosylation of the binding proteins. Glycosylation can contribute to the effector function of antibodies, particularly IgG1 antibodies. Glycosylation of polypeptides is typically either N-linked or O-linked. N-linked refers to the attachment of the carbohydrate moiety to the side chain of an asparagine residue. The tri-peptide sequences asparagine-X-serine and asparagine-X-threonine, where X is any amino acid except proline, are the recognition sequences for enzymatic attachment of the carbohydrate moiety to the asparagine side chain. Thus, the presence of either of these tri-peptide sequences in a polypeptide creates a potential glycosylation site. O-linked glycosylation refers to the attachment of one of the sugars N-acetylgalactosamine, galactose, or xylose, to a hydroxyamino acid, most commonly serine or threonine, although 5-hydroxyproline or 5-hydroxylysine may also be used.

[0679] In some embodiments, glycosylation of the TREM2 agonist antigen binding proteins described herein is increased by adding one or more glycosylation sites, e.g., to the Fc region of the binding protein. Addition of glycosylation sites to the antigen binding protein can be conveniently accomplished by altering the amino acid sequence such that it contains one or more of the above-described tri-peptide sequences (for N-linked glycosylation sites). The alteration may also be made by the addition of, or substitution by, one or more serine or threonine residues to the starting sequence (for O-linked glycosylation sites). For ease, the antigen binding protein amino acid sequence may be altered through changes at the DNA level, particularly by mutating the DNA encoding the target polypeptide at preselected bases such that codons are generated that will translate into the desired amino acids.

[0680] The invention also encompasses production of TREM2 antigen binding protein molecules with altered carbohydrate structure resulting in altered effector activity, including antigen binding proteins with absent or reduced fucosylation that exhibit improved ADCC activity. Various methods are known in the art to reduce or eliminate fucosylation. For example, ADCC effector activity is mediated by binding of the antibody molecule to the FcγRIII receptor, which has been shown to be dependent on the carbohydrate structure of the N-linked glycosylation at the N297 residue of the CH2 domain. Non-fucosylated antibodies bind this receptor with increased affinity and trigger FcγRIII-mediated effector functions more efficiently than native, fucosylated antibodies. For example, recombinant production of non-fucosylated antibody in CHO cells in which the alpha-1,6-fucosyl transferase enzyme has been knocked out results in antibody with 100-fold increased ADCC activity (see Yamane-Ohnuki et al., Biotechnol Bioeng. 87(5):614-22, 2004). Similar effects can be accomplished through decreasing the activity of alpha-1,6-fucosyl transferase enzyme or other enzymes in the fucosylation pathway, e.g., through siRNA or antisense RNA treatment, engineering cell lines to knockout the enzyme(s), or culturing with selective glycosylation inhibitors (see Rothman et al., Mol Immunol. 26(12):1113-23, 1989). Some host cell strains, e.g. Lec13 or rat hybridoma YB2/0 cell line naturally produce antibodies with lower fucosylation levels (see Shields et al., J Biol Chem. 277(30):26733-40, 2002 and Shinkawa et al., J Biol Chem. 278(5):3466-73, 2003). An increase in the level of bisected carbohydrate, e.g. through recombinantly producing antibody in cells that overexpress GnTIII enzyme, has also been determined to increase ADCC activity (see Umana et al., Nat Biotechnol. 17(2):176-80, 1999).

[0681] In other embodiments, glycosylation of the TREM2 agonist antigen binding proteins described herein is decreased or eliminated by removing one or more glycosylation sites, e.g., from the Fc region of the binding protein. In some embodiments, the TREM2 agonist antigen binding protein is an aglycosylated human monoclonal antibody, e.g. an aglycosylated human IgG1 monoclonal antibody. Amino acid substitutions that eliminate or alter N-linked glycosylation sites can reduce or eliminate N-linked glycosylation of the antigen binding protein. In certain embodiments, the TREM2 agonist antigen binding proteins described herein comprise a mutation at position N297 (according to EU numbering scheme), such as N297Q, N297A, or N297G. In some embodiments, the TREM2 agonist antigen binding proteins of the invention comprise an Fc region from a human IgG1 antibody with a mutation at position N297. In one particular embodiment, the TREM2 agonist antigen binding proteins of the invention comprise an Fc region from a human IgG1 antibody with a N297G mutation. For instance, in some embodiments, the TREM2 agonist antigen binding proteins of the invention comprise a heavy chain constant region comprising the sequence of SEQ ID NO: 202.

[0682] To improve the stability of molecules comprising a N297 mutation, the Fc region of the TREM2 agonist antigen binding proteins may be further engineered. For instance, in some embodiments, one or more amino acids in the Fc region are substituted with cysteine to promote disulfide bond formation in the dimeric state. Residues corresponding to V259, A287, R292, V302, L306, V323, or I332 (according to EU numbering scheme) of an IgG1 Fc region may thus be substituted with cysteine. Preferably, specific pairs of residues are substituted with cysteine such that they preferentially form a disulfide bond with each other, thus limiting or preventing disulfide bond scrambling. Preferred pairs include, but are not limited to, A287C and L306C, V259C and L306C, R292C and V302C, and V323C and I332C. In certain embodiments, the TREM2 agonist antigen binding proteins described herein comprise an Fc region from a human IgG1 antibody with mutations R292C and V302C. In such embodiments, the Fc region may also comprise a N297 mutation, such as a N297G mutation. In some embodiments, the TREM2 agonist antigen binding proteins of the invention comprise a heavy chain constant region comprising the sequence of SEQ ID NO: 203.

[0683] Modifications to the hinge region and/or CH1 domain of the heavy chain and/or the constant region of the light chain of the TREM2 agonist antigen binding proteins (e.g. monoclonal antibodies) of the invention can be made to reduce or eliminate disulfide heterogeneity. Structural hetereogeneity of IgG2 antibodies has been observed where the disulfide bonds in the hinge and CH1 regions of IgG2 antibodies can be shuffled to create different structural disulfide isoforms (IgG2A, IgG2B, and IgG2A-B), which can have different levels of activity. See, e.g., Dillon et al., J. Biol. Chem., Vol. 283: 16206-16215; Martinez et al., Biochemistry, Vol. 47: 7496-7508, 2008; and White et al., Cancer Cell, Vol. 27: 138-148, 2015. Amino acid substitutions can be made in the hinge region, CH1 domain, and/or light chain constant region to promote the formation of a single disulfide isoform or lock the antigen binding protein (e.g. monoclonal antibody) into a particular disulfide isoform (e.g. IgG2A or IgG2B). Such mutations are described in WO 2009/036209 and White et al., Cancer Cell, Vol. 27: 138-148, 2015, both of which are hereby incorporated by reference in its entirety, and include C131S, C219S, and C220S (according to EU numbering scheme) mutations in the heavy chain and a C214S (according to EU numbering scheme) mutation in the light chain. In certain embodiments, the TREM2 agonist antigen binding proteins of the invention are human IgG2 anti-TREM2 agonist antibodies. In some such embodiments, the TREM2 agonist antibodies comprise a C131S mutation (according to the EU numbering scheme) in their heavy chains. In other embodiments, the TREM2 agonist antibodies comprise a C214S mutation (according to the EU numbering scheme) in their light chains and a C220S mutation (according to the EU numbering scheme) in their heavy chains. In still other embodiments, the TREM2 agonist antibodies comprise a C214S mutation (according to the EU numbering scheme) in their light chains and a C219S mutation (according to the EU numbering scheme) in their heavy chains.

[0684] In other embodiments, the TREM2 agonist antigen binding proteins of the invention are anti-TREM2 agonist antibodies comprising a CH1 region and hinge region from a human IgG2 antibody and an Fc region from a human IgG1 antibody. The unique arrangement of the disulfide bonds in the hinge region of IgG2 antibodies has been reported to impart enhanced stimulatory activity for certain anticancer antibodies (White et al., Cancer Cell, Vol. 27: 138-148, 2015). This enhanced activity could be transferred to IgG1-type antibodies by exchanging the CH1 and hinge regions of the IgG1 antibody for those in the IgG2 antibody (White et al., 2015). The IgG2 hinge region includes the amino acid sequence ERKCCVECPPCP (SEQ ID NO: 206). The amino acid sequence of the CH1 and hinge regions from a human IgG2 antibody may comprise the following amino acid sequence:

(SEQ ID NO: 207)
ASTKGPSVFP LAPCSRSTSE STAALGCLVK DYFPEPVTVS
WNSGALTSGV HTFPAVLQSS GLYSLSSVVT VPSSNFGTQT
YTCNVDHKPS NTKVDKTVER KCCVECPPCP.

[0685] In some embodiments, the antigen binding agents based on any heavy chain variable region or C Thus, in some embodiments, the anti-TREM2 agonist antibodies comprise the sequence of SEQ ID NO: 207 in combination with an Fc region from a human IgG1 antibody. In such embodiments, the anti-TREM2 antibodies can comprise one or more of the mutations described above to lock the anti-TREM2 antibodies into a particular disulfide isoform. For instance, in one embodiment, the anti-TREM2 antibody comprises a CH1 region and hinge region from a human IgG2 antibody and an Fc region from a human IgG1 antibody and comprises a C131S mutation (according to the EU numbering scheme) in its heavy chain. In another embodiment, the anti-TREM2 antibody comprises a CH1 region and hinge region from a human IgG2 antibody and an Fc region from a human IgG1 antibody and comprises a C214S mutation (according to the EU numbering scheme) in its light chain and a C220S mutation (according to the EU numbering scheme) in its heavy chain. In yet another embodiment, the anti-TREM2 antibody comprises a CH1 region and hinge region from a human IgG2 antibody and an Fc region from a human IgG1 antibody and comprises a C214S mutation (according to the EU numbering scheme) in its light chain and a C219S mutation (according to the EU numbering scheme) in its heavy chain.

[0686] In embodiments in which the anti-TREM2 antibodies comprise a CH1 region and hinge region from a human IgG2 antibody and an Fc region from a human IgG1 antibody, the anti-TREM2 antibodies may comprise any of the mutations in the Fc region described above to modulate the glycosylation of the antibodies. For instance, the human IgG1 Fc region of such anti-TREM2 antibodies may comprise a mutation at amino acid position N297 (according to the EU numbering scheme) in its heavy chain. In one particular embodiment, the N297 mutation is a N297G mutation. In certain embodiments, the Fc region may further comprise R292C and V302C mutations (according to the EU numbering scheme) in its heavy chain.

[0687] In certain embodiments, the anti-TREM2 antibodies of the invention comprise a CH1 region and hinge region from a human IgG2 antibody and an Fc region from a human IgG1 antibody, wherein the Fc region comprises the amino acid sequence of.

(SEQ ID NO: 281)
APELLGGPSVFLEPPKPKDILMISRIPEVICVVVDVSHEDPEVKFNWYV
DGVEVHNAKTKPREEQYGSTYRVVSVLTVLHQDWLNGKEYKCKVSNKAL
PAPIEKTISKAKGQPREPQVYTLPPSREEMTKNQVSLICLVKGFYPSDI
AVEWESNGQPENNYKTTPPVLDSDGSFELYSKLTVDKSRWQQGNVESCS
VMHEALHNHYTQKSLSLSPGK.

[0688] In other embodiments, the anti-TREM2 antibodies of the invention comprise a CH1 region and hinge region from a human IgG2 antibody and an Fc region from a human IgG1 antibody, wherein the Fc region comprises the amino acid sequence of:

(SEQ ID NO: 282)
APELLGGPSVFLFPPKPKDTLMISRTPEVTCVVVDVSHEDPEVKFNWYV
DGVEVHNAKTKPCEEQYGSTYRCVSVLTVLHQDWLNGKEYKCKVSNKAL
PAPIEKTISKAKGQPREPQVYTLPPSREEMTKNQVSLTCLVKGFYPSDI
AVEWESNGQPENNYKTTPPVLDSDGSFFLYSKLTVDKSRWQQGNVFSCS
VMHEALHNHYTQKSLSLSPGK.

[0689] Modifications of the TREM2 agonist antigen binding proteins of the invention to increase serum half-life also may desirable, for example, by incorporation of or addition of a salvage receptor binding epitope (e.g., by mutation of the appropriate region or by incorporating the epitope into a peptide tag that is then fused to the antigen binding protein at either end or in the middle, e.g., by DNA or peptide synthesis; see, e.g., WO96/32478) or adding molecules such as PEG or other water soluble polymers, including polysaccharide polymers. The salvage receptor binding epitope preferably constitutes a region wherein any one or more amino acid residues from one or two loops of an Fc region are transferred to an analogous position in the antigen binding protein. Even more preferably, three or more residues from one or two loops of the Fc region are transferred. Still more preferred, the epitope is taken from the CH2 domain of the Fc region (e.g., an IgG Fc region) and transferred to the CH1, CH3, or VH region, or more than one such region, of the antigen binding protein. Alternatively, the epitope is taken from the CH2 domain of the Fc region and transferred to the CL region or VL region, or both, of the antigen binding protein. See International applications WO 97/34631 and WO 96/32478 for a description of Fc variants and their interaction with the salvage receptor.

### Antibody Fragments

[0690] In some embodiments, the antigen binding agent can be a fragment of the antibody of the present disclosure, including portions of a full length antibody, and includes the antigen binding or variable region. Exemplary antibody fragments include Fab, Fab′, F(ab′)₂ and Fv fragments. In some embodiments, proteolytic digestion with papain produces two identical antigen binding fragments, the Fab′ fragment, each with a single antigen binding site. In some embodiments, proteolytic digestion with pepsin yields an F(ab′)₂ fragment that has two antigen binding fragments which are capable of cross-linking antigen, and a residual pFc′ fragment. In some embodiments, antibody fragments are produced directly in recombinant host-cells, for example host cells that that have a polynucleotide encoding an antigen binding agent described herein. For example, Fab, Fv and scFv antibody fragments can all be expressed in and secreted from E. coli, thus allowing the straightforward production of large amounts of these fragments. Anti-TREM2 antibody fragments can also be isolated from the antibody phage libraries as discussed above. Alternatively, Fab′-SH fragments can be directly recovered from E. coli and chemically coupled to form F(ab′)₂ fragments (Carter et al., Bio/Technology 10:163-167 (1992)). According to another approach, F(ab′)₂ fragments can be isolated directly from recombinant host-cell culture. Production of Fab and F(ab′)₂ antibody fragments with increased in vivo half-lives are described in U.S. Pat. No. 5,869,046. In other embodiments, the antibody of choice is a single chain Fv fragment (scFv). See WO 93/16185; U.S. Pat. Nos. 5,571,894 and 5,587,458. Accordingly, other types of fragments can include diabodies, linear antibodies, single-chain antibodies, and multispecific antibodies formed from antibody fragments. In some embodiments, the antibody fragments are functional in that they retain the desired antigen binding properties, e.g., specific binding to TREM2, activation of TREM2 activities, and the like as described herein.

### Bispecific Antibodies

[0691] In some embodiments, the TREM2 binding protein is a bispecific antibody that binds to a TREM2 protein of the present disclosure and a second antigen. In some embodiments, bispecific antibodies of the present disclosure bind to one or more amino acid residues of human TREM2 (SEQ ID NO: 1), or amino acid residues on a TREM2 protein corresponding to amino acid residues of SEQ ID NO: 1. In some embodiments, any of the TREM2 binding proteins described herein can be used to prepare the bispecific antibody.

[0692] In some embodiments, bispecific antibodies of the present disclosure recognize a first antigen and a second antigen. In some embodiments, the first antigen is human TREM2 or a naturally occurring variant thereof. In some embodiments, the second antigen is DAP12, or other proteins or ligand that interact with TREM2. In some embodiments, the second antigen is (a) an antigen facilitating transport across the blood-brain-barrier; (b) an antigen facilitating transport across the blood-brain-barrier, for example transferrin receptor (TR), insulin receptor (HIR), insulin-like growth factor receptor (IGFR), low-density lipoprotein receptor related proteins 1 and 2 (LPR-1 and 2), diphtheria toxin receptor, CRM 197, a llama single domain antibody, TMEM 30(A), a protein transduction domain, TAT, Syn-B, penetratin, a poly-arginine peptide, an angiopep peptide, and ANG1005; (c) a disease-causing protein selected from amyloid beta, oligomeric amyloid beta, amyloid beta plaques, amyloid precursor protein or fragments thereof, Tau, IAPP, alpha-synuclein, TDP-43, FUS protein, C9orf72 (chromosome 9 open reading frame 72), c9RAN protein, prion protein, PrPSc, huntingtin, calcitonin, superoxide dismutase, ataxin, ataxin 1, ataxin 2, ataxin 3, ataxin 7, ataxin 8, ataxin 10, Lewy body, atrial natriuretic factor, islet amyloid polypeptide, insulin, apolipoprotein AI, serum amyloid A, medin, prolactin, transthyretin, lysozyme, beta 2 microglobulin, gelsolin, keratoepithelin, cystatin, immunoglobulin light chain AL, S-IBM protein, Repeat-associated non-ATG (RAN) translation products, DiPeptide repeat (DPR) peptides, glycine-alanine (GA) repeat peptides, glycine-proline (GP) repeat peptides, glycine-arginine (GR) repeat peptides, proline-alanine (PA) repeat peptides, ubiquitin, and proline-arginine (PR) repeat peptides; and (d) ligands and/or proteins expressed on immune cells, wherein the ligands and/or proteins selected from CD40, OX40, ICOS, CD28, CD137/4-1BB, CD27, GITR, PD-L1, CTLA-4, PD-L2, PD-1, B7-H3, B7-H4, HVEM, BTLA, KIR, GAL9, TIM3, A2AR, LAG-3, and phosphatidylserine; and (e) a protein, lipid, polysaccharide, or glycolipid expressed on one or more tumor cells and any combination thereof.

[0693] Methods for making bispecific antibodies are known in the art. Traditional production of full-length bispecific antibodies is based on the coexpression of two immunoglobulin heavy-chain/light chain pairs, where the two chains have different specificities. Millstein et al., Nature, 305:537-539 (1983). Because of the random assortment of immunoglobulin heavy and light chains, these hybridomas (quadromas) produce a potential mixture of 10 different antibody molecules, of which only one has the correct bispecific structure. Purification of the correct molecule, which is usually done by affinity chromatography steps, is rather cumbersome, and the product yields are low. Similar procedures are disclosed in WO 93/08829 and in Traunecker et al., EMBO J., 10:3655-3659 (1991).

[0694] In some embodiments, antibody variable domains with the desired binding specificities (antibody-antigen combining sites) are fused to immunoglobulin constant domain sequences. The fusion preferably is with an immunoglobulin heavy chain constant domain, comprising at least part of the hinge, CH2, and CH3 regions. It is preferred to have the first heavy-chain constant region (CH1) containing the site necessary for light chain binding, present in at least one of the fusions. DNAs encoding the immunoglobulin heavy chain fusions and, if desired, the immunoglobulin light chain, are inserted into separate expression vectors, and are co-transfected into a suitable host organism. This provides for great flexibility in adjusting the mutual proportions of the three polypeptide fragments in embodiments when unequal ratios of the three polypeptide chains used in the construction provide the optimum yields. It is, however, possible to insert the coding sequences for two or all three polypeptide chains in one expression vector when the expression of at least two polypeptide chains in equal ratios results in high yields or when the ratios are of no particular significance.

[0695] In some embodiments, the bispecific antibodies are composed of a hybrid immunoglobulin heavy chain with a first binding specificity in one arm, and a hybrid immunoglobulin heavy chain-light chain pair (providing a second binding specificity) in the other arm. It was found that this asymmetric structure facilitates the separation of the desired bispecific compound from unwanted immunoglobulin chain combinations, as the presence of an immunoglobulin light chain in only half of the bispecific molecules provides for an easy way of separation. This approach is disclosed in WO 94/04690. For further details of generating bispecific antibodies, see, for example, Suresh et al., Methods in Enzymology 121:210 (1986); and Garber, Nature Reviews Drug Discovery 13, 799-801 (2014).

[0696] In some embodiments, the bispecific antibody can be prepared as described in WO 96/27011 or U.S. Pat. No. 5,731,168. In these embodiments, the interface between a pair of antibody molecules can be engineered to maximize the percentage of heterodimers which are recovered from recombinant-cell culture. The preferred interface comprises at least a part of the CH3 region of an antibody constant domain. In this method, one or more small amino acid side chains from the interface of the first antibody molecule are replaced with larger side chains (e.g., tyrosine or tryptophan). Compensatory “cavities” of identical or similar size to the large side chains(s) are created on the interface of the second antibody molecule by replacing large amino acid side chains with smaller ones (e.g., alanine or threonine). This provides a mechanism for increasing the yield of the heterodimer over other unwanted end-products such as homodimers.

[0697] In some embodiments, bispecific antibody can be prepared Techniques for generating bispecific antibodies from antibody fragments have been described in for example, Brennan et al., Science, 1985, 229:81, which describe proteolytic cleavage of intact antibodies to generate F(ab′)2 fragments, which are then reduced in the presence of the dithiol complexing agent sodium arsenite to stabilize vicinal dithiols and prevent intermolecular disulfide formation. The Fab′ fragments generated are then converted to thionitrobenzoate (TNB) derivatives. One of the Fab′-TNB derivatives is then reconverted to the Fab′-TNB derivative to form the bispecific antibody. The bispecific antibodies produced can be used as agents for the selective immobilization of enzyme.

[0698] Various techniques for making and isolating bivalent antibody fragments directly from recombinant-cell culture have also been described. For example, bivalent heterodimers have been produced using leucine zippers. Kostelny et al., Immunol., 1992, 148(5):1547-1553. The “diabody” technology described by Hollinger et al., Proc. Nat'l Acad. Sci. USA, 1993, 90: 6444-6448, provides an alternative mechanism for making bispecific/bivalent antibody fragments. The fragments comprise a heavy-chain variable domain (VH) connected to a light-chain variable domain (VL) by a linker which is too short to allow pairing between the two domains on the same chain. Accordingly, the VH and VL domains of one fragment are forced to pair with the complementary VL and VH domains of another fragment, thereby forming two antigen-binding sites. Another strategy for making bispecific/bivalent antibody fragments by the use of single-chain Fv (sFv) dimers (see, e.g., Gruber et al., Immunol, 152:5368 (1994).

### Single Chain Antibodies

[0699] In some embodiments, the TREM2 binding protein is a single chain antibody, e.g., single chain Fv (sFv or scFv) antibodies, in which a variable heavy and a variable light chain are joined together (directly or through a peptide linker) to form a continuous polypeptide. A single-chain Fv” or “sFv” antibody fragments comprise the VH and VL domains of an antibody, where these domains are present in a single polypeptide chain. Generally, the Fv polypeptide further comprises a polypeptide linker between the VH and VL domains which enables the sFv to form the desired structure for antigen binding. For a review of sFv, see Pluckthun in The Pharmacology of Monoclonal Antibodies, Vol. 113, pp. 269-315, Rosenburg and Moore, eds., Springer-Verlag, New York (1994). Any of the TREM2 binding agents described herein can be used to prepare a single chain antibody.

[0700] In some embodiments, single chain antibody can be prepared by phage display methods, where the antigen binding domain is expressed as a single polypeptide and screened for specific binding activity. Alternatively, the single chain antibody can be prepared by cloning the heavy and light chains from a cell, typically a hybridoma cell line expressing a desired antibody. Generally, a linker peptide, typically from 10 to 25 amino acids in length is used to link the heavy and light chains. The linker can be glycine, serine, and/or threonine rich to impart flexibility and solubility to the single chain antibody. Specific methods for generating single chain antibodies are described in, for example, Loffler et al., 2000, Blood 95(6):2098-103; Worn and Pluckthun, 2001, J Mol Biol. 305, 989-1010; Pluckthun, In The Pharmacology of Monoclonal Antibodies, Vol. 113, pp. 269-315, Rosenburg and Moore, eds., Springer-Verlag, New York (1994); U.S. Pat. Nos. 5,840,301; 5,844,093; and 5,892,020; all of which are incorporated herein by reference.

### Multivalent Antibodies

[0701] In some embodiments, the anti-TREM2 antibody is a multivalent antibody, which may be internalized (and/or catabolized) faster than a bivalent antibody by a cell expressing an antigen to which the antibodies bind. In some embodiments, the anti-TREM2 antibodies of the present disclosure or antibody fragments thereof can be multivalent antibodies (which are other than of the IgM class) with three or more antigen binding sites (e.g., tetravalent antibodies), which can be readily produced by recombinant expression of nucleic acid encoding the polypeptide chains of the antibody. The multivalent antibody can comprise a dimerization domain and three or more antigen binding sites. A preferred dimerization domain comprises an Fc region or a hinge region. In this scenario, the antibody will comprise an Fc region and three or more antigen binding sites amino-terminal to the Fc region. The preferred multivalent antibody herein contains three to about eight, but preferably four, antigen binding sites. The multivalent antibody contains at least one polypeptide chain (and preferably two polypeptide chains), wherein the polypeptide chain or chains comprise two or more variable domains. For instance, the polypeptide chain or chains may comprise VD1-(X1)n-VD2-(X2)n-Fc, wherein VD1 is a first variable domain, VD2 is a second variable domain, Fc is one polypeptide chain of an Fc region, XI and X2 represent an amino acid or polypeptide, and n is 0 or 1. Similarly, the polypeptide chain or chains may comprise VH-CH1-flexible linker-VH-CH1-Fc region chain; or VH-CH1-VH-CH1-FC region chain. The multivalent antibody herein preferably further comprises at least two (and preferably four) light chain variable domain polypeptides. The multivalent antibody herein may, for instance, comprise from about two to about eight light chain variable domain polypeptides. The light chain variable domain polypeptides contemplated here comprise a light chain variable domain and, optionally, further comprise a CL domain.

[0702] Multivalent antibodies may recognize the TREM2 antigen as well as without limitation additional antigens A beta peptide, antigen or an alpha synuclein protein antigen or, Tau protein antigen or, TDP-43 protein antigen or, prion protein antigen or, huntingtin protein antigen, or RAN, translation Products antigen, including the DiPeptide Repeats, (DPRs peptides) composed of glycine-alanine (GA), glycine-proline (GP), glycine-arginine (GR), proline-alanine (PA), or proline-arginine (PR), Insulin receptor, insulin like growth factor receptor. Transferrin receptor or any other antigen that facilitate antibody transfer across the blood brain barrier.

### Polynucleotides Encoding TREM2 Antibodies

[0703] In another aspect, the present disclosure provides polynucleotides encoding the antibodies or antigen binding regions of the described herein. In particular, the polynucleotides are isolated polynucleotides. The polynucleotides may be operatively linked to one or more heterologous control sequences that control gene expression to create a recombinant polynucleotide capable of expressing the polypeptide of interest. Expression constructs containing a heterologous polynucleotide encoding the relevant polypeptide or protein can be introduced into appropriate host cells to express the corresponding polypeptide.

[0704] As will be appreciated by those in the art, due to the degeneracy of the genetic code, where the same amino acids are encoded by alternative or synonymous codons, an extremely large number of nucleic acids can be made, all of which encode the CDRs, variable regions, and heavy and light chains or other components of the antigen binding proteins described herein. Thus, having identified a particular amino acid sequence, those skilled in the art could make any number of different nucleic acids, by simply modifying the sequence of one or more codons in a way which does not change the amino acid sequence of the encoded protein. In this regard, the present disclosure includes each and every possible variation of polynucleotides that encode the polypeptides disclosed herein.

[0705] An “isolated nucleic acid,” which is used interchangeably herein with “isolated polynucleotide,” is a nucleic acid that has been separated from adjacent genetic sequences present in the genome of the organism from which the nucleic acid was isolated, in the case of nucleic acids isolated from naturally-occurring sources. In the case of nucleic acids synthesized enzymatically from a template or chemically, such as PCR products, cDNA molecules, or oligonucleotides for example, it is understood that the nucleic acids resulting from such processes are isolated nucleic acids. An isolated nucleic acid molecule refers to a nucleic acid molecule in the form of a separate fragment or as a component of a larger nucleic acid construct. In one preferred embodiment, the nucleic acids are substantially free from contaminating endogenous material.

[0706] In some embodiments, the polynucleotide encodes a CDR L1, CDR L2 and CDR L3 of a light chain variable region described herein. In some embodiments, the polynucleotide encodes a CDR H1, CDR H2 and CDR H3 of a heavy chain variable region described herein.

[0707] In some embodiments, the polynucleotide encodes a CDR L1, CDR L2 and CDR L3 of a light chain variable region and a CDR H1, CDR H2 and CDR H3 of a heavy chain variable region described herein.

[0708] In some embodiments, the polynucleotide encodes a light chain variable region VL having at least 80%, 85%, 90%, 91%, 92%, 93%, 94%, 95%, 96%, 97%, 98%, 99% or greater sequence identity to the amino acid sequence of a variable light chain disclosed herein.

[0709] In some embodiments, the polynucleotide encodes a heavy chain variable region VH having at least 80%, 85%, 90%, 91%, 92%, 93%, 94%, 95%, 96%, 97%, 98%, 99% or greater sequence identity to the amino acid sequence of a variable heavy chain disclosed herein.

[0710] In some embodiments, the polynucleotides herein may be manipulated in a variety of ways to provide for expression of the encoded polypeptide. In some embodiments, the polynucleotide is operably linked to control sequences, including among others, transcription promoters, leader sequences, transcription enhancers, ribosome binding or entry sites, termination sequences, and polyadenylation sequences for expression of the polynucleotide and/or corresponding polypeptide. Manipulation of the isolated polynucleotide prior to its insertion into a vector may be desirable or necessary depending on the expression vector. The techniques for modifying polynucleotides and nucleic acid sequences utilizing recombinant DNA methods are well known in the art. Guidance is provided in Sambrook et al., Molecular Cloning: A Laboratory Manual, 3rd Ed., Cold Spring Harbor Laboratory Press (2001); and Current Protocols in Molecular Biology, Ausubel. F. ed., Greene Pub. Associates (1998), updates to 2013.

[0711] In some embodiments, variants of the antigen binding proteins, including the variants described herein, can be prepared by site-specific mutagenesis of nucleotides in the DNA encoding the polypeptide, using cassette or PCR mutagenesis or other techniques well known in the art, to produce DNA encoding the variant, and thereafter expressing the recombinant DNA in cell culture as outlined herein. However, antigen binding proteins comprising variant CDRs having up to about 100-150 residues may be prepared by in vitro synthesis using established techniques. The variants typically exhibit the same qualitative biological activity as the naturally occurring analogue, e.g., binding to antigen. Such variants include, for example, deletions and/or insertions and/or substitutions of residues within the amino acid sequences of the antigen binding proteins. Any combination of deletion, insertion, and substitution is made to arrive at the final construct, provided that the final construct possesses the desired characteristics. The amino acid changes also may alter post-translational processes of the antigen binding protein, such as changing the number or position of glycosylation sites. In some embodiments, antigen binding protein variants are prepared with the intent to modify those amino acid residues which are directly involved in epitope binding. In other embodiments, modification of residues which are not directly involved in epitope binding or residues not involved in epitope binding in any way, is desirable, for purposes discussed herein. Mutagenesis within any of the CDR regions, framework regions, and/or constant regions is contemplated. Covariance analysis techniques can be employed by the skilled artisan to design useful modifications in the amino acid sequence of the antigen binding protein. See, e.g., Choulier, et al., Proteins 41:475-484, 2000; Demarest et al., J. Mol. Biol., 2004, 335:41-48; Hugo et al., Protein Engineering, 2003, 16(5):381-86; Aurora et al., US Patent Publication No. 2008/0318207 A1; Glaser et al., US Patent Publication No. 2009/0048122 A1; Urech et al., WO 2008/110348 A1; Borras et al., WO 2009/000099 A2. Such modifications determined by covariance analysis can improve potency, pharmacokinetic, pharmacodynamic, and/or manufacturability characteristics of an antigen binding protein.

[0712] In another aspect, the present invention also provides vectors comprising one or more nucleic acids or polynucleotides encoding one or more components of the antigen binding proteins describe herein (e.g. variable regions, light chains, and heavy chains). As used herein, the term “vector” refers to any molecule or entity (e.g., nucleic acid, plasmid, bacteriophage or virus) used to transfer protein coding information into a host cell. Examples of vectors include, but are not limited to, plasmids, viral vectors, non-episomal mammalian vectors and expression vectors, for example, recombinant expression vectors. The term “expression vector” or “expression construct” as used herein refers to a recombinant DNA molecule containing a desired coding sequence and appropriate nucleic acid control sequences necessary for the expression of the operably linked coding sequence in a particular host cell. An expression vector can include, but is not limited to, sequences that affect or control transcription, translation, and, if introns are present, affect RNA splicing of a coding region operably linked thereto. Nucleic acid sequences necessary for expression in prokaryotes include a promoter, optionally an operator sequence, a ribosome binding site and possibly other sequences. Eukaryotic cells are known to utilize promoters, enhancers, and termination and polyadenylation signals. A secretory signal peptide sequence can also, optionally, be encoded by the expression vector, operably linked to the coding sequence of interest, so that the expressed polypeptide can be secreted by the recombinant host cell, for more facile isolation of the polypeptide of interest from the cell, if desired.

[0713] The recombinant expression vector may be any vector (e.g., a plasmid or virus), which can be conveniently subjected to recombinant DNA procedures and can bring about the expression of the polynucleotide sequence. The choice of the vector will typically depend on the compatibility of the vector with the host cell into which the vector is to be introduced. The vectors may be linear or closed circular plasmids. Exemplary expression vectors include, among others, vectors based on T7 or T71ac promoters (pACY: Novagen; pET); vectors based on Baculovirus promoters (e.g., pBAC); vectors based on Efl-α and HTLV promoters (e.g., pFUSE2; Invitrogen, CA, USA); vectors based on CMV enhancer and human ferritin light chain gene promoters (e.g., pFUSE: Invitrogen, CA, USA); vectors based on CMV promoters (e.g, pFLAG: Sigma, USA); and vectors based on dihydrofolate reductase promoters (e.g., pEASE: Amgen, USA). Various vectors can be used for transient or stable expression of the polypeptides of interest.

### Host Cells

[0714] In another aspect, the polynucleotide encoding the antigen binding proteins described herein (e.g. variable regions, light chains, and heavy chains) is operatively linked to one or more control sequences for expression of the polypeptide in the host cell. Accordingly, in a further aspect, the present disclosure provides a host cell comprising one or more expression vectors encoding the components of the TREM2 agonist antigen binding proteins described herein.

[0715] Exemplary host cells include prokaryote, yeast, or higher eukaryote cells. Prokaryotic host cells include eubacteria, such as Gram-negative or Gram-positive organisms, for example, Enterobacteriaceae such as Escherichia, e.g., E. coli, Enterobacter, Erwinia, Klebsiella, Proteus, Salmonella, e.g., Salmonella typhimurium, Serratia, e.g., Serratia marcescans, and Shigella, as well as Bacillus, such as B. subtilis and B. licheniformis, Pseudomonas, and Streptomyces. Eukaryotic microbes such as filamentous fungi or yeast are suitable cloning or expression hosts for recombinant polypeptides. Saccharomyces cerevisiae, or common baker's yeast, is the most commonly used among lower eukaryotic host microorganisms. However, a number of other genera, species, and strains are commonly available and useful herein, such as Pichia, e.g. P. pastoris, Schizosaccharomyces pombe; Kluyveromyces, Yarrowia; Candida; Trichoderma reesia; Neurospora crassa; Schwanniomyces, such as Schwanniomyces occidentalis; and filamentous fungi, such as, e.g., Neurospora, Penicillium, Tolypocladium, and Aspergillus hosts such as A. nidulans and A. niger.

[0716] Host cells for the expression of glycosylated antigen binding proteins can be derived from multicellular organisms. Examples of invertebrate cells include plant and insect cells. Numerous baculoviral strains and variants and corresponding permissive insect host cells from hosts such as Spodoptera frugiperda (caterpillar), Aedes aegypti (mosquito), Aedes albopictus (mosquito), Drosophila melanogaster (fruitfly), and Bombyx mori have been identified. A variety of viral strains for transfection of such cells are publicly available, e.g., the L-1 variant of Autographa californica NPV and the Bm-5 strain of Bombyx mori NPV.

[0717] Vertebrate host cells are also suitable hosts, and recombinant production of antigen binding proteins from such cells has become routine procedure. Mammalian cell lines available as hosts for expression are well known in the art and include, but are not limited to, immortalized cell lines available from the American Type Culture Collection (ATCC), including but not limited to Chinese hamster ovary (CHO) cells, including CHOK1 cells (ATCC CCL61), DXB-11, DG-44, and Chinese hamster ovary cells/-DHFR (CHO, Urlaub et al., Proc. Natl. Acad. Sci. USA, 1980, 77: 4216); monkey kidney CV1 line transformed by SV40 (COS-7, ATCC CRL 1651); human embryonic kidney line (293 or 293 cells subcloned for growth in suspension culture, (Graham et al., J. Gen Virol. 36: 59, 1977); baby hamster kidney cells (BHK, ATCC CCL 10); mouse sertoli cells (TM4, Mather, Biol. Reprod., 1980, 23:243-251); monkey kidney cells (CV1 ATCC CCL 70); African green monkey kidney cells (VERO-76, ATCC CRL-1587); human cervical carcinoma cells (HELA, ATCC CCL 2); canine kidney cells (MDCK, ATCC CCL 34); buffalo rat liver cells (BRL 3A, ATCC CRL 1442); human lung cells (W138, ATCC CCL 75); human hepatoma cells (Hep G2, HB 8065); mouse mammary tumor (MMT 060562, ATCC CCL51); TRI cells (Mather et al., Annals N.Y Acad. Sci., 1982, 383:44-68); MRC 5 cells or FS4 cells; mammalian myeloma cells, and a number of other cell lines. In certain embodiments, cell lines may be selected through determining which cell lines have high expression levels and constitutively produce antigen binding proteins with human TREM2 binding properties. In another embodiment, a cell line from the B cell lineage that does not make its own antibody but has a capacity to make and secrete a heterologous antibody can be selected. CHO cells are preferred host cells in some embodiments for expressing the TREM2 agonist antigen binding proteins of the invention.

[0718] In various embodiments, introduction and transformation of a host cell with a polynucleotide of the present disclosure, such as an expression vector for expressing an antigen binding protein, is accomplished by methods that including transfection, infection, calcium phosphate co-precipitation, electroporation, microinjection, lipofection, DEAE-dextran mediated transfection, or other known techniques. In some embodiments, the method selected can be guided by the type of host cell used. Suitable methods are described in, for example, Sambrook et al., 2001.

### Expression and Isolation

[0719] In some embodiments, the host cell comprising a polynucleotide encoding one or more components of the antigen binding proteins described herein (e.g. variable regions, light chains, and heavy chains) is used to express the antigen binding protein of interest. In some embodiments, a method for expressing the antigen binding protein comprises culturing the host cell in suitable media and conditions appropriate for expression of the protein of interest.

[0720] The type of media and culture conditions selected is based on the type of host cell. In some embodiments, exemplary media for mammalian host cells include, by way of example and not limitation, Ham's F10 (Sigma), Minimal Essential Medium (MEM, Sigma), RPMI-1640 (Sigma), and Dulbecco's Modified Eagle's Medium (DMEM, Sigma. In some embodiments, the media can be supplemented as necessary with hormones and/or other growth factors (such as insulin, transferrin, or epidermal growth factor), salts (such as sodium chloride, calcium, magnesium, and phosphate), buffers (such as HEPES), nucleotides (such as adenosine and thymidine), antibiotics (such as Gentamycin™ drug), trace elements (defined as inorganic compounds usually present at final concentrations in the micromolar range), and glucose or an equivalent energy source. In some embodiments, culture conditions, such as temperature, pH, % CO₂, and the like, can use conditions available and known to the skilled artisan.

[0721] In some embodiments, the expressed antigen binding protein is isolate and/or purified from the host cell. In some embodiments in which the expressed protein in present in the media, the media containing the expressed protein is subject to isolation procedures. In some embodiments in which the antigen binding protein is produced intracellularly, the cells are subject to disruption, and as a first step, the particulate debris, either host cells or lysed fragments, is removed, for example, by centrifugation or ultrafiltration. Subsequently, the antigen binding protein can be isolated and further purified by various known techniques. Such isolation techniques include affinity chromatography with Protein-A Sepharose, size-exclusion chromatography, ion-exchange chromatography, high performance liquid chromatography, differential solubility, and the like (see, e.g., Fisher, Laboratory Techniques, In Biochemistry And Molecular Biology, Work and Burdon, eds., Elsevier (1980); Antibodies: A Laboratory Manual, Greenfield, E. A., ed., Cold Spring Harbor Laboratory Press, New York (2012); Coligan, et al., supra, sections 2.7.1-2.7.12 and sections 2.9.1-2.9.3; Barnes, et al., Purification of Immunoglobulin G (IgG), in Methods Mol. Biol., Vol. 10, pages 79-104, Humana Press (1992)).

[0722] In some embodiments, the isolated antibody can be further purified as measurable by: (1) weight of protein as determined using the Lowry method; (2) to a degree sufficient to obtain at least 15 residues of N-terminal or internal amino acid sequence by use of a spinning-cup sequencer; or (3) to homogeneity by SDS-PAGE under reducing or non-reducing conditions using Coomassie blue or, preferably, silver stain. The purified antibody can be 85% or greater, 90% or greater, 95% or greater, or at least 99% by weight as determined by the foregoing methods.

### Antibody Formulations

[0723] In certain embodiments, the invention provides a composition (e.g. a pharmaceutical composition) comprising one or a plurality of the TREM2 activating antibodies and TREM2 agonist antibodies and antigen binding proteins disclosed herein together with pharmaceutically acceptable diluents, carriers, excipients, solubilizers, emulsifiers, preservatives, and/or adjuvants. Pharmaceutical compositions of the invention include, but are not limited to, liquid, frozen, and lyophilized compositions. “Pharmaceutically-acceptable” refers to molecules, compounds, and compositions that are non-toxic to human recipients at the dosages and concentrations employed and/or do not produce allergic or adverse reactions when administered to humans. In some embodiments, the pharmaceutical composition may contain formulation materials for modifying, maintaining or preserving, for example, the pH, osmolarity, viscosity, clarity, color, isotonicity, odor, sterility, stability, rate of dissolution or release, adsorption or penetration of the composition. In such embodiments, suitable formulation materials include, but are not limited to, amino acids (such as glycine, glutamine, asparagine, arginine or lysine); antimicrobials; antioxidants (such as ascorbic acid, sodium sulfite or sodium hydrogen-sulfite); buffers (such as borate, bicarbonate, Tris-HCl, citrates, phosphates or other organic acids); bulking agents (such as mannitol or glycine); chelating agents (such as ethylenediamine tetraacetic acid (EDTA)); complexing agents (such as caffeine, polyvinylpyrrolidone, beta-cyclodextrin or hydroxypropyl-beta-cyclodextrin); fillers; monosaccharides; disaccharides; and other carbohydrates (such as glucose, mannose or dextrins); proteins (such as serum albumin, gelatin or immunoglobulins); coloring, flavoring and diluting agents; emulsifying agents; hydrophilic polymers (such as polyvinylpyrrolidone); low molecular weight polypeptides; salt-forming counterions (such as sodium); preservatives (such as benzalkonium chloride, benzoic acid, salicylic acid, thimerosal, phenethyl alcohol, methylparaben, propylparaben, chlorhexidine, sorbic acid or hydrogen peroxide); solvents (such as glycerin, propylene glycol or polyethylene glycol); sugar alcohols (such as mannitol or sorbitol); suspending agents; surfactants or wetting agents (such as pluronics, PEG, sorbitan esters, polysorbates such as polysorbate 20, polysorbate 80, triton, tromethamine, lecithin, cholesterol, tyloxapal); stability enhancing agents (such as sucrose or sorbitol); tonicity enhancing agents (such as alkali metal halides, preferably sodium or potassium chloride, mannitol sorbitol); delivery vehicles; diluents; excipients and/or pharmaceutical adjuvants. Methods and suitable materials for formulating molecules for therapeutic use are known in the pharmaceutical arts, and are described, for example, in Remington's Pharmaceutical Sciences, 18th Ed., (A. R. Genrmo, ed.), 1990, Mack Publishing Company.

[0724] In some embodiments, the pharmaceutical composition of the invention comprises a standard pharmaceutical carrier, such as a sterile phosphate buffered saline solution, bacteriostatic water, and the like. A variety of aqueous carriers may be used, e.g., water, buffered water, 0.4% saline, 0.3% glycine and the like, and may include other proteins for enhanced stability, such as albumin, lipoprotein, globulin, etc., subjected to mild chemical modifications or the like.

[0725] Exemplary concentrations of the antigen binding proteins in the formulation may range from about 0.1 mg/ml to about 200 mg/ml or from about 0.1 mg/mL to about 50 mg/mL, or from about 0.5 mg/mL to about 25 mg/mL, or alternatively from about 2 mg/mL to about 10 mg/mL. An aqueous formulation of the antigen binding protein may be prepared in a pH-buffered solution, for example, at pH ranging from about 4.5 to about 6.5, or from about 4.8 to about 5.5, or alternatively about 5.0. Examples of buffers that are suitable for a pH within this range include acetate (e.g. sodium acetate), succinate (such as sodium succinate), gluconate, histidine, citrate and other organic acid buffers. The buffer concentration can be from about 1 mM to about 200 mM, or from about 10 mM to about 60 mM, depending, for example, on the buffer and the desired isotonicity of the formulation.

[0726] A tonicity agent, which may also stabilize the antigen binding protein, may be included in the formulation. Exemplary tonicity agents include polyols, such as mannitol, sucrose or trehalose. Preferably the aqueous formulation is isotonic, although hypertonic or hypotonic solutions may be suitable. Exemplary concentrations of the polyol in the formulation may range from about 1% to about 15% w/v.

[0727] A surfactant may also be added to the antigen binding protein formulation to reduce aggregation of the formulated antigen binding protein and/or minimize the formation of particulates in the formulation and/or reduce adsorption. Exemplary surfactants include nonionic surfactants such as polysorbates (e.g., polysorbate 20 or polysorbate 80) or poloxamers (e.g., poloxamer 188). Exemplary concentrations of surfactant may range from about 0.001% to about 0.5%, or from about 0.005% to about 0.2%, or alternatively from about 0.004% to about 0.01% w/v.

[0728] In one embodiment, the formulation contains the above-identified agents (i.e. antigen binding protein, buffer, polyol and surfactant) and is essentially free of one or more preservatives, such as benzyl alcohol, phenol, m-cresol, chlorobutanol and benzethonium chloride. In another embodiment, a preservative may be included in the formulation, e.g., at concentrations ranging from about 0.1% to about 2%, or alternatively from about 0.5% to about 1%. One or more other pharmaceutically acceptable carriers, excipients or stabilizers such as those described in REMINGTON'S PHARMACEUTICAL SCIENCES, 18th Edition, (A. R. Genrmo, ed.), 1990, Mack Publishing Company, may be included in the formulation provided that they do not adversely affect the desired characteristics of the formulation.

[0729] Therapeutic formulations of the antigen binding protein are prepared for storage by mixing the antigen binding protein having the desired degree of purity with optional physiologically acceptable carriers, excipients or stabilizers (Remington's Pharmaceutical Sciences, 18th Ed., (A. R. Genrmo, ed.), 1990, Mack Publishing Company), in the form of lyophilized formulations or aqueous solutions. Acceptable carriers, excipients, or stabilizers are nontoxic to recipients at the dosages and concentrations employed, and include buffers (e.g. phosphate, citrate, and other organic acids); antioxidants (e.g. ascorbic acid and methionine); preservatives (such as octadecyldimethylbenzyl ammonium chloride, hexamethonium chloride, benzalkonium chloride, benzethonium chloride, phenol, butyl or benzyl alcohol, alkyl parabens such as methyl or propyl paraben, catechol; resorcinol, cyclohexanol, 3-pentanol, and m-cresol); low molecular weight (e.g. less than about 10 residues) polypeptides; proteins (such as serum albumin, gelatin, or immunoglobulins); hydrophilic polymers (e.g. polyvinylpyrrolidone); amino acids (e.g. glycine, glutamine, asparagine, histidine, arginine, or lysine); monosaccharides, disaccharides, and other carbohydrates including glucose, mannose, maltose, or dextrins; chelating agents such as EDTA; sugars such as sucrose, mannitol, trehalose or sorbitol; salt-forming counter-ions such as sodium; metal complexes (e.g., Zn-protein complexes); and/or nonionic surfactants, such as polysorbates (e.g. polysorbate 20 or polysorbate 80) or poloxamers (e.g. poloxamer 188); or polyethylene glycol (PEG).

[0730] In one embodiment, a suitable formulation of the claimed invention contains an isotonic buffer such as a phosphate, acetate, or TRIS buffer in combination with a tonicity agent, such as a polyol, sorbitol, sucrose or sodium chloride, which tonicifies and stabilizes. One example of such a tonicity agent is 5% sorbitol or sucrose. In addition, the formulation could optionally include a surfactant at 0.01% to 0.02% wt/vol, for example, to prevent aggregation or improve stability. The pH of the formulation may range from 4.5 to 6.5 or 4.5 to 5.5. Other exemplary descriptions of pharmaceutical formulations for antigen binding proteins may be found in US Patent Publication No. 2003/0113316 and U.S. Pat. No. 6,171,586, each of which is hereby incorporated by reference in its entirety.

[0731] Suspensions and crystal forms of antigen binding proteins are also contemplated. Methods to make suspensions and crystal forms are known to one of skill in the art.

[0732] The formulations to be used for in vivo administration must be sterile. The compositions of the invention may be sterilized by conventional, well-known sterilization techniques. For example, sterilization is readily accomplished by filtration through sterile filtration membranes. The resulting solutions may be packaged for use or filtered under aseptic conditions and lyophilized, the lyophilized preparation being combined with a sterile solution prior to administration.

[0733] The process of freeze-drying is often employed to stabilize polypeptides for long-term storage, particularly when the polypeptide is relatively unstable in liquid compositions. A lyophilization cycle is usually composed of three steps: freezing, primary drying, and secondary drying (see Williams and Polli, Journal of Parenteral Science and Technology, 1984, 38(2):48-59). In the freezing step, the solution is cooled until it is adequately frozen. Bulk water in the solution forms ice at this stage. The ice sublimes in the primary drying stage, which is conducted by reducing chamber pressure below the vapor pressure of the ice, using a vacuum. Finally, sorbed or bound water is removed at the secondary drying stage under reduced chamber pressure and an elevated shelf temperature. The process produces a material known as a lyophilized cake. Thereafter the cake can be reconstituted prior to use.

[0734] The standard reconstitution practice for lyophilized material is to add back a volume of pure water (typically equivalent to the volume removed during lyophilization), although dilute solutions of antibacterial agents are sometimes used in the production of pharmaceuticals for parenteral administration (see Chen, Drug Development and Industrial Pharmacy, Volume 18: 1311-1354, 1992).

[0735] Excipients have been noted in some cases to act as stabilizers for freeze-dried products (see Carpenter et al., Volume 74: 225-239, 1991). For example, known excipients include polyols (including mannitol, sorbitol and glycerol); sugars (including glucose and sucrose); and amino acids (including alanine, glycine and glutamic acid).

[0736] In addition, polyols and sugars are also often used to protect polypeptides from freezing and drying-induced damage and to enhance the stability during storage in the dried state. In general, sugars, in particular disaccharides, are effective in both the freeze-drying process and during storage. Other classes of molecules, including mono- and di-saccharides and polymers such as PVP, have also been reported as stabilizers of lyophilized products.

[0737] For injection, the pharmaceutical formulation and/or medicament may be a powder suitable for reconstitution with an appropriate solution as described above. Examples of these include, but are not limited to, freeze dried, rotary dried or spray dried powders, amorphous powders, granules, precipitates, or particulates. For injection, the formulations may optionally contain stabilizers, pH modifiers, surfactants, bioavailability modifiers and combinations of these.

[0738] Sustained-release preparations may be prepared. Suitable examples of sustained-release preparations include semipermeable matrices of solid hydrophobic polymers containing the antigen binding protein, which matrices are in the form of shaped articles, e.g., films, or microcapsule. Examples of sustained-release matrices include polyesters, hydrogels (for example, poly(2-hydroxyethyl-methacrylate), or poly(vinylalcohol)), polylactides (U.S. Pat. No. 3,773,919), copolymers of L-glutamic acid and y ethyl-L-glutamate, non-degradable ethylene-vinyl acetate, degradable lactic acid-glycolic acid copolymers such as the Lupron Depot™ (injectable microspheres composed of lactic acid-glycolic acid copolymer and leuprolide acetate), and poly-D-(−)-3-hydroxybutyric acid. While polymers such as ethylene-vinyl acetate and lactic acid-glycolic acid enable release of molecules for over 100 days, certain hydrogels release proteins for shorter time periods. When encapsulated polypeptides remain in the body for a long time, they may denature or aggregate as a result of exposure to moisture at 37° C., resulting in a loss of biological activity and possible changes in immunogenicity. Rational strategies can be devised for stabilization depending on the mechanism involved. For example, if the aggregation mechanism is discovered to be intermolecular S—S bond formation through thio-disulfide interchange, stabilization may be achieved by modifying sulfhydryl residues, lyophilizing from acidic solutions, controlling moisture content, using appropriate additives, and developing specific polymer matrix compositions.

[0739] The formulations of the invention may be designed to be short-acting, fast-releasing, long-acting, or sustained-releasing. Thus, the pharmaceutical formulations may also be formulated for controlled release or for slow release.

[0740] Specific dosages may be adjusted depending on the disease, disorder, or condition to be treated, the age, body weight, general health conditions, sex, and diet of the subject, dose intervals, administration routes, excretion rate, and combinations of drugs.

[0741] The TREM2 agonist antigen binding proteins of the invention can be administered by any suitable means, including parenteral, subcutaneous, intraperitoneal, intrapulmonary, intrathecal, intracerebral, intracerebroventricular, and intranasal, and, if desired for local treatment, intralesional administration. Parenteral administration includes intravenous, intraarterial, intraperitoneal, intramuscular, intradermal or subcutaneous administration. In addition, the antigen binding protein is suitably administered by pulse infusion, particularly with declining doses of the antigen binding protein. Preferably, the dosing is given by injections, most preferably intravenous or subcutaneous injections, depending in part on whether the administration is brief or chronic. Other administration methods are contemplated, including topical, particularly transdermal, transmucosal, rectal, oral or local administration e.g. through a catheter placed close to the desired site. In certain embodiments, the TREM2 agonist antigen binding protein of the invention is administered intravenously or subcutaneously in a physiological solution at a dose ranging between 0.01 mg/kg to 100 mg/kg at a frequency ranging from daily to weekly to monthly (e.g. every day, every other day, every third day, or 2, 3, 4, 5, or 6 times per week), preferably a dose ranging from 0.1 to 45 mg/kg, 0.1 to 15 mg/kg or 0.1 to 10 mg/kg at a frequency of once per week, once every two weeks, or once a month.

[0742] The TREM2 agonist antigen binding proteins described herein (e.g. anti-TREM2 agonist monoclonal antibodies and binding fragments thereof) are useful for preventing, treating, or ameliorating a condition associated with TREM2 deficiency or loss of biological function of TREM2 in a patient in need thereof. As used herein, the term “treating” or “treatment” is an intervention performed with the intention of preventing the development or altering the pathology of a disorder. Accordingly, “treatment” refers to both therapeutic treatment and prophylactic or preventative measures. Patients in need of treatment include those already diagnosed with or suffering from the disorder or condition as well as those in which the disorder or condition is to be prevented, such as patients who are at risk of developing the disorder or condition based on, for example, genetic markers. “Treatment” includes any indicia of success in the amelioration of an injury, pathology or condition, including any objective or subjective parameter such as abatement, remission, diminishing of symptoms, or making the injury, pathology or condition more tolerable to the patient, slowing in the rate of degeneration or decline, making the final point of degeneration less debilitating, or improving a patient's physical or mental well-being. The treatment or amelioration of symptoms can be based on objective or subjective parameters, including the results of a physical examination, self-reporting by a patient, cognitive tests, motor function tests, neuropsychiatric exams, and/or a psychiatric evaluation.

### III. Small Molecule TREM2 Agonists

[0743] In some embodiments, the agonist of TREM2 is a small molecule agonist of TREM2.

[0744] In some embodiments, the agonist of TREM2 is a lipid ligand of TREM2. In some embodiments, the lipid ligand of TREM2 is selected from 1-palmitoyl-2-(5′-oxo-valeroyl)-sn-glycero-3-phosphocholine (POVPC), 2-Arachidonoylglycerol (2-AG), 7-ketocholesterol (7-KC), 24(S)hydroxycholesterol (240HC), 25(S)hydroxycholesterol (250HC), 27-hydroxycholesterol (270HC), Acyl Carnitine (AC), alkylacylglycerophosphocholine (PAF), a-galactosylceramide (KRN7000), Bis(monoacylglycero)phosphate (BMP), Cardiolipin (CL), Ceramide, Ceramide-1-phosphate (CIP), Cholesteryl ester (CE), Cholesterol phosphate (CP), Diacylglycerol 34:1 (DG 34:1), Diacylglycerol 38:4 (DG 38:4), Diacylglycerol pyrophosphate (DGPP), Dihyrdoceramide (DhCer), Dihydrosphingomyelin (DhSM), Ether phosphatidylcholine (PCe), Free cholesterol (FC), Galactosylceramide (GalCer), Galactosylsphingosine (GalSo), Ganglioside GM1, Ganglioside GM3, Glucosylsphingosine (GlcSo), Hank's Balanced Salt Solution (HBSS), Kdo2-Lipid A (KLA), Lactosylceramide (LacCer), lysoalkylacylglycerophosphocholine (LPAF), Lysophosphatidic acid (LPA), Lysophosphatidylcholine (LPC), Lysophosphatidylethanolamine (LPE), Lysophosphatidylglycerol (LPG), Lysophosphatidylinositol (LPI), Lysosphingomyelin (LSM), Lysophosphatidylserine (LPS), N-Acyl-phosphatidylethanolamine (NAPE), N-Acyl-Serine (NSer), Oxidized phosphatidylcholine (oxPC), Palmitic-acid-9-hydroxy-stearic-acid (PAHSA), Phosphatidylethanolamine (PE), Phosphatidylethanol (PEtOH), Phosphatidic acid (PA), Phosphatidylcholine (PC), Phosphatidylglycerol (PG), Phosphatidylinositol (PI), Phosphatidylserine (PS), Sphinganine, Sphinganine-1-phosphate (SalP), Sphingomyelin (SM), Sphingosine, Sphingosine-1-phosphate (SolP), or Sulfatide, or a salt thereof.

[0745] In some embodiments, the agonist of TREM2 is a lipopolysaccharide.

[0746] In some embodiments, the agonist of TREM2 is a small molecule disclosed in PCT Application Publication WO2019/079529, which is incorporated by reference herein in its entirety. In some embodiments, the agonist of TREM2 is Tyrphostin AG 538, AC1NS458, IN1040, Butein, Okanin, AGL 2263, GB19, GB16, GB20, GB17, GB18, GB21, GB22, GB27, GB44, GB42, GB2, 4,4′-Dihydroxychalcone, or 3,4-Dihydroxybenzophenone, or a derivative or salt of any of the aforementioned.

[0747] In some embodiments, the agonist of TREM2 is a small molecule identified by a method disclosed in PCT Application Publication WO2019/079529. In some embodiments, the small molecule agonist of TREM2 is identified by applying the small molecule compound to a host cell expressing TREM2 and tyrosine kinase binding protein (TYROBP), wherein the host cell has a synthetic sequence comprising an NFAT-response element and a nucleotide sequence encoding a reporter, and measuring a signal emitted by the reporter.

### IV. Other TREM2 Agonists

[0748] In some embodiments, the agonist of TREM2 is heat shock protein 60 (HSP60).

[0749] In some embodiments, the agonist of TREM2 is apopoliprotein E (ApoE).

### V. Neurofilament Biomarkers

[0750] In some embodiments, the method of the invention further comprises measuring the level of neurofilaments and/or neurofilament degradation products in a sample collected from the patient.

[0751] In some embodiments, the sample is a whole blood sample. In some embodiments, the sample is a serum sample. In some embodiments, the sample is a plasma sample. In some embodiments, the sample is a cerebrospinal fluid (CSF) sample.

[0752] In some embodiments, the method comprises measuring the levels of neurofilament proteins in the central nervous system of the patient. In some embodiments, the method comprises measuring the levels of neurofilament light chain protein in the central nervous system of the patient. In some embodiments, the method comprises measuring the levels of neurofilament light chain protein in the serum of the patient. In some embodiments, the method comprises measuring the levels of neurofilament light chain protein in the plasma of the patient. In some embodiments, the method comprises measuring the levels of neurofilament heavy chain protein in the central nervous system of the patient. In some embodiments, the method comprises measuring the levels of neurofilament heavy chain protein in the serum of the patient. In some embodiments, the method comprises measuring the levels of neurofilament heavy chain protein in the plasma of the patient.

[0753] In one aspect, the present invention provides a method of treating a disease or disorder caused by and/or associated with CSF1R dysfunction in a human patient, the method comprising:
[0754] (a) measuring the level of neurofilaments and/or neurofilament degradation products in a sample collected from the patient;
[0755] (b) determining whether the patient has a disease or disorder caused by and/or associated with CSF1R dysfunction or is a carrier of a CSF1R mutation based on the measured levels of neurofilaments and/or neurofilament degradation products in the sample; and
[0756] (c) if the patient is determined to have a disease or disorder caused by and/or associated with CSF1R dysfunction or is a carrier of a CSF1R mutation, administering to the patient an effective amount of an agonist of TREM2.

[0757] In some embodiments, the patient is determined to have a disease or disorder caused by and/or associated with CSF1R dysfunction or is a carrier of a CSF1R mutation if the levels of neurofilament degradation products in the sample are elevated. As used herein, the term “elevated” refers to a level of neurofilament degradation products higher than observed in a sample collected from a patient with normal CSF1R function. In some embodiments, an elevated level of neurofilament degradation products refers to a neurofilament degradation product level that is more than 2 times higher than normal levels, more than 3 times higher than normal levels, more than 4 times higher than normal levels, more than 5 times higher than normal levels, more than 10 times higher than normal levels, more than 20 times higher than normal levels, more than 30 times higher than normal levels, more than 40 times higher than normal levels, more than 50 times higher than normal levels, or more than 100 times higher than normal levels. In some embodiments, the elevated neurofilament degradation product is neurofilament light chain protein.

[0758] In some embodiments, the patient is determined to have a disease or disorder caused by and/or associated with CSF1R dysfunction or is a carrier of a CSF1R mutation if the central levels of neurofilament in the sample are lower than the central levels of neurofilament observed in a sample collected from a patient with normal CSF1R function. In some embodiments, the central level of neurofilament is less than 90% of normal central neurofilament levels, less than 80% of normal central neurofilament levels, less than 70% of normal central neurofilament levels, less than 60% of normal central neurofilament levels, or less than 50% of normal central neurofilament levels.

[0759] In another aspect, the present invention provides a method of identifying a patient suffering from a disease or disorder caused by and/or associated with CSF1R dysfunction, or a carrier of a CSF1R mutation, that would benefit from treatment with an agonist of TREM2, the method comprising:
[0760] (a) collecting a first sample from the patient;
[0761] (b) measuring the level of neurofilaments and/or neurofilament degradation products in the first sample collected from the patient;
[0762] (c) administering to the patient an agonist of TREM2;
[0763] (d) collecting a second sample from the patient; and
[0764] (e) measuring the level of neurofilaments and/or neurofilament degradation products in the second sample collected from the patient;
[0765] wherein the difference in the level of neurofilaments and/or neurofilament degradation products between the first sample and second sample is predictive of treatment response.

[0766] In some embodiments, a decrease in neurofilament degradation product levels from the first sample to the second sample indicates that treatment of the disease or disorder with the TREM2 agonist is effective. In some embodiments, the first sample and second sample are plasma samples, serum samples or CSF samples.

[0767] In some embodiments, an increase or no change in neurofilament degradation product levels from the first sample to the second sample indicates that treatment of the disease or disorder with the TREM2 agonist is ineffective. In some embodiments, the first sample and second sample are plasma samples, serum samples or CSF samples.

[0768] In some embodiments, an increase in central neurofilament levels from the first sample to the second sample indicates that treatment of the disease or disorder with the TREM2 agonist is effective.

[0769] In some embodiments, a decrease or no change in central neurofilament levels from the first sample to the second sample indicates that treatment of the disease or disorder with the TREM2 agonist is ineffective.

[0770] In another aspect, the present invention provides a method of treating a disease or disorder caused by and/or associated with CSF1R dysfunction in a human patient, the method comprising:
[0771] (a) collecting a first sample from the patient;
[0772] (b) measuring the level of neurofilaments and/or neurofilament degradation products in the first sample collected from the patient;
[0773] (c) administering to the patient an agonist of TREM2 at a first dosage;
[0774] (d) collecting a second sample from the patient;
[0775] (e) measuring the level of neurofilaments and/or neurofilament degradation products in the second sample collected from the patient;
[0776] (f) modifying the initial dosage of the agonist of TREM2 based on the level of neurofilaments and/or neurofilament degradation products in the sample collected from the patient to determine a modified dosage; and
[0777] (g) administering to the patient the agonist of TREM2 at the modified dosage.

[0778] In some embodiments, if there is a decrease in neurofilament degradation product levels from the first sample to the second sample, the first dosage does not require modification, and the modified dosage should contain the same or lower dosage of TREM2 agonist than the first dosage. In some embodiments, the first sample and second sample are plasma samples, serum samples or CSF samples. In some embodiments, the neurofilament degradation product is neurofilament light chain protein.

[0779] In some embodiments, if there is an increase or no change in neurofilament degradation product levels from the first sample to the second sample, the modified dosage should contain a higher dosage of TREM2 agonist than the second dosage. In some embodiments, the first sample and second sample are plasma samples, serum samples or CSF samples. In some embodiments, the neurofilament degradation product is neurofilament light chain protein.

[0780] In some embodiments, if there is an increase in central neurofilament levels from the first sample to the second sample, the first dosage does not require modification, and the modified dosage should contain the same or lower dosage of TREM2 agonist than the first dosage.

[0781] In some embodiments, if there is a decrease or no change in central neurofilament levels from the first sample to the second sample, the modified dosage should contain a higher dosage of TREM2 agonist than the second dosage.

[0782] In one aspect, the present invention provides a method of treating a disease or disorder caused by and/or associated with a CSF1R dysfunction in a human patient, wherein the patient has an elevated level of neurofilament degradation product, the method comprising administering to the patient an effective amount of an agonist of TREM2. In some embodiments, the disease or disorder is ALSP. In some embodiments, the neurofilament degradation product is neurofilament light chain protein.

### Pharmaceutically Acceptable Compositions

[0783] In certain embodiments, a TREM2 activating antibody or small molecule disclosed herein is formulated as a composition for administration to a patient in need of such composition.

[0784] The term “pharmaceutically acceptable carrier, adjuvant, or vehicle” refers to a non-toxic carrier, adjuvant, or vehicle that does not destroy the pharmacological activity of the compound with which it is formulated. Pharmaceutically acceptable carriers, adjuvants or vehicles that may be used in the compositions of this invention include, but are not limited to, ion exchangers, alumina, aluminum stearate, lecithin, serum proteins, such as human serum albumin, buffer substances such as phosphates, glycine, sorbic acid, potassium sorbate, partial glyceride mixtures of saturated vegetable fatty acids, water, salts or electrolytes, such as protamine sulfate, disodium hydrogen phosphate, potassium hydrogen phosphate, sodium chloride, zinc salts, colloidal silica, magnesium trisilicate, polyvinyl pyrrolidone, cellulose-based substances, polyethylene glycol, sodium carboxymethylcellulose, polyacrylates, waxes, polyethylene-polyoxypropylene-block polymers, polyethylene glycol and wool fat.

[0785] A “pharmaceutically acceptable derivative” means any non-toxic salt, ester, salt of an ester or other derivative of a compound of this invention that, upon administration to a recipient, is capable of providing, either directly or indirectly, a compound of this invention or an inhibitorily active metabolite or residue thereof.

[0786] Compositions of the present invention may be administered orally, parenterally, by inhalation spray, topically, rectally, nasally, buccally, vaginally or via an implanted reservoir. The term “parenteral” as used herein includes subcutaneous, intravenous, intramuscular, intra-articular, intra-synovial, intrasternal, intrathecal, intrahepatic, intralesional and intracranial injection or infusion techniques. In some embodiments, the compositions are administered orally, intraperitoneally or intravenously. Sterile injectable forms of the compositions of this invention may be aqueous or oleaginous suspension. These suspensions may be formulated according to techniques known in the art using suitable dispersing or wetting agents and suspending agents. The sterile injectable preparation may also be a sterile injectable solution or suspension in a non-toxic parenterally acceptable diluent or solvent, for example as a solution in 1,3-butanediol. Among the acceptable vehicles and solvents that may be employed are water, Ringer's solution and isotonic sodium chloride solution. In addition, sterile, fixed oils are conventionally employed as a solvent or suspending medium.

[0787] For this purpose, any bland fixed oil may be employed including synthetic mono- or di-glycerides. Fatty acids, such as oleic acid and its glyceride derivatives are useful in the preparation of injectables, as are natural pharmaceutically-acceptable oils, such as olive oil or castor oil, especially in their polyoxyethylated versions. These oil solutions or suspensions may also contain a long-chain alcohol diluent or dispersant, such as carboxymethyl cellulose or similar dispersing agents that are commonly used in the formulation of pharmaceutically acceptable dosage forms including emulsions and suspensions. Other commonly used surfactants, such as Tweens, Spans and other emulsifying agents or bioavailability enhancers which are commonly used in the manufacture of pharmaceutically acceptable solid, liquid, or other dosage forms may also be used for the purposes of formulation.

[0788] Pharmaceutically acceptable compositions of this invention may be orally administered in any orally acceptable dosage form including, but not limited to, capsules, tablets, aqueous suspensions or solutions. In the case of tablets for oral use, carriers commonly used include lactose and corn starch. Lubricating agents, such as magnesium stearate, are also typically added. For oral administration in a capsule form, useful diluents include lactose and dried cornstarch. When aqueous suspensions are required for oral use, the active ingredient is combined with emulsifying and suspending agents. If desired, certain sweetening, flavoring or coloring agents may also be added.

[0789] Alternatively, pharmaceutically acceptable compositions of this invention may be administered in the form of suppositories for rectal administration. These can be prepared by mixing the agent with a suitable non-irritating excipient that is solid at room temperature but liquid at rectal temperature and therefore will melt in the rectum to release the drug. Such materials include cocoa butter, beeswax and polyethylene glycols.

[0790] Pharmaceutically acceptable compositions of this invention may also be administered topically, especially when the target of treatment includes areas or organs readily accessible by topical application, including diseases of the eye, the skin, or the lower intestinal tract. Suitable topical formulations are readily prepared for each of these areas or organs.

[0791] Topical application for the lower intestinal tract can be effected in a rectal suppository formulation (see above) or in a suitable enema formulation. Topically-transdermal patches may also be used.

[0792] For topical applications, provided pharmaceutically acceptable compositions may be formulated in a suitable ointment containing the active component suspended or dissolved in one or more carriers. Carriers for topical administration of compounds of this invention include, but are not limited to, mineral oil, liquid petrolatum, white petrolatum, propylene glycol, polyoxyethylene, polyoxypropylene compound, emulsifying wax and water. Alternatively, provided pharmaceutically acceptable compositions can be formulated in a suitable lotion or cream containing the active components suspended or dissolved in one or more pharmaceutically acceptable carriers. Suitable carriers include, but are not limited to, mineral oil, sorbitan monostearate, polysorbate 60, cetyl esters wax, cetearyl alcohol, 2-octyldodecanol, benzyl alcohol and water.

[0793] For ophthalmic use, provided pharmaceutically acceptable compositions may be formulated as micronized suspensions in isotonic, pH adjusted sterile saline, or as solutions in isotonic, pH adjusted sterile saline, either with or without a preservative such as benzylalkonium chloride. Alternatively, for ophthalmic uses, the pharmaceutically acceptable compositions may be formulated in an ointment such as petrolatum.

[0794] Pharmaceutically acceptable compositions of this invention may also be administered by nasal aerosol or inhalation. Such compositions are prepared according to techniques well-known in the art of pharmaceutical formulation and may be prepared as solutions in saline, employing benzyl alcohol or other suitable preservatives, absorption promoters to enhance bioavailability, fluorocarbons, and/or other conventional solubilizing or dispersing agents.

[0795] In some embodiments, pharmaceutically acceptable compositions of this invention are formulated for oral administration. Such formulations may be administered with or without food. In some embodiments, pharmaceutically acceptable compositions of this invention are administered without food. In other embodiments, pharmaceutically acceptable compositions of this invention are administered with food.

[0796] In other embodiments, pharmaceutically acceptable compositions of this invention are formulated for intravenous (IV) administration.

[0797] The amount of compounds of the present invention that may be combined with the carrier materials to produce a composition in a single dosage form will vary depending upon the host treated, the particular mode of administration. Preferably, provided compositions should be formulated so that a dosage of between 0.01-100 mg/kg body weight/day of the inhibitor can be administered to a patient receiving these compositions.

[0798] It should also be understood that a specific dosage and treatment regimen for any particular patient will depend upon a variety of factors, including the activity of the specific compound employed, the age, body weight, general health, sex, diet, time of administration, rate of excretion, drug combination, and the judgment of the treating physician and the severity of the particular disease being treated. The amount of a compound of the present invention in the composition will also depend upon the particular compound in the composition.

### Uses of Compounds and Pharmaceutically Acceptable Compositions

[0799] Compounds and compositions described herein are generally useful for the treatment of ALSP in the various methods disclosed herein.

[0800] The activity of a compound utilized in the present invention may be assayed in vitro, in vivo or in a cell line. In vitro assays include assays that determine modulation or binding to a protein. Detailed conditions for assaying a compound are set forth in the Examples below.

[0801] As used herein, the terms “treatment,” “treat,” and “treating” refer to reversing, alleviating, delaying the onset of, or inhibiting the progress of a disease or disorder, or one or more symptoms thereof, as described herein. In some embodiments, treatment may be administered after one or more symptoms have developed. In other embodiments, treatment may be administered in the absence of symptoms. For example, treatment may be administered to a susceptible individual prior to the onset of symptoms (e.g., in light of a history of symptoms and/or in light of genetic or other susceptibility factors). Treatment may also be continued after symptoms have resolved, for example to prevent or delay their recurrence.

[0802] The compounds and compositions, according to the method of the present invention, may be administered using any amount and any route of administration effective for treating or lessening the severity of a disclosed disease or condition, or associated condition or symptom. The exact amount required will vary from subject to subject, depending on the species, age, and general condition of the subject, the severity of the disease or condition, the particular agent, its mode of administration, and the like. Compounds of the invention are preferably formulated in dosage unit form for ease of administration and uniformity of dosage. The expression “dosage unit form” as used herein refers to a physically discrete unit of agent appropriate for the patient to be treated. It will be understood, however, that the total daily usage of the compounds and compositions of the present invention will be decided by the attending physician within the scope of sound medical judgment. The specific effective dose level for any particular patient or organism will depend upon a variety of factors including the disorder being treated and the severity of the disorder; the activity of the specific compound employed; the specific composition employed; the age, body weight, general health, sex and diet of the patient; the time of administration, route of administration, and rate of excretion of the specific compound employed; the duration of the treatment; drugs used in combination or coincidental with the specific compound employed, and like factors well known in the medical arts. The term “patient”, as used herein, means an animal, in some embodiments a mammal, or in certain other embodiments a human.

[0803] Pharmaceutically acceptable compositions of this invention can be administered to humans and other animals orally, sublingually, rectally, parenterally, intracisternally, intravaginally, intraperitoneally, topically (as by powders, ointments, or drops), intraocularly (such as eye drops), bucally, as an oral or nasal spray, or the like, depending on the severity of the disease or condition being treated. In certain embodiments, the compounds of the invention may be administered orally or parenterally at dosage levels of about 0.01 mg/kg to about 50 mg/kg or from about 1 mg/kg to about 25 mg/kg, of subject body weight per day, one or more times a day, to obtain the desired therapeutic effect.

[0804] Liquid dosage forms for oral administration include, but are not limited to, pharmaceutically acceptable emulsions, microemulsions, solutions, suspensions, syrups and elixirs. In addition to the active compounds, the liquid dosage forms may contain inert diluents commonly used in the art such as, for example, water or other solvents, solubilizing agents and emulsifiers such as ethyl alcohol, isopropyl alcohol, ethyl carbonate, ethyl acetate, benzyl alcohol, benzyl benzoate, propylene glycol, 1,3-butylene glycol, dimethylformamide, oils (in particular, cottonseed, groundnut, corn, germ, olive, castor, and sesame oils), glycerol, tetrahydrofurfuryl alcohol, polyethylene glycols and fatty acid esters of sorbitan, and mixtures thereof. Besides inert diluents, the oral compositions can also include adjuvants such as wetting agents, emulsifying and suspending agents, sweetening, flavoring, and perfuming agents.

[0805] Injectable preparations, for example, sterile injectable aqueous or oleaginous suspensions may be formulated according to the known art using suitable dispersing or wetting agents and suspending agents. The sterile injectable preparation may also be a sterile injectable solution, suspension or emulsion in a nontoxic parenterally acceptable diluent or solvent, for example, as a solution in 1,3-butanediol. Among the acceptable vehicles and solvents that may be employed are water, Ringer's solution, U.S.P. and isotonic sodium chloride solution. In addition, sterile, fixed oils are conventionally employed as a solvent or suspending medium. For this purpose any bland fixed oil can be employed including synthetic mono- or diglycerides. In addition, fatty acids such as oleic acid are used in the preparation of injectables.

[0806] Injectable formulations can be sterilized, for example, by filtration through a bacterial-retaining filter, or by incorporating sterilizing agents in the form of sterile solid compositions which can be dissolved or dispersed in sterile water or other sterile injectable medium prior to use.

[0807] In order to prolong the effect of a compound of the present invention, it is often desirable to slow the absorption of the compound from subcutaneous or intramuscular injection. This may be accomplished by the use of a liquid suspension of crystalline or amorphous material with poor water solubility. The rate of absorption of the compound then depends upon its rate of dissolution that, in turn, may depend upon crystal size and crystalline form. Alternatively, delayed absorption of a parenterally administered compound form is accomplished by dissolving or suspending the compound in an oil vehicle. Injectable depot forms are made by forming microencapsule matrices of the compound in biodegradable polymers such as polylactide-polyglycolide. Depending upon the ratio of compound to polymer and the nature of the particular polymer employed, the rate of compound release can be controlled. Examples of other biodegradable polymers include poly(orthoesters) and poly(anhydrides). Depot injectable formulations are also prepared by entrapping the compound in liposomes or microemulsions that are compatible with body tissues.

[0808] Compositions for rectal or vaginal administration are preferably suppositories which can be prepared by mixing the compounds of this invention with suitable non-irritating excipients or carriers such as cocoa butter, polyethylene glycol or a suppository wax which are solid at ambient temperature but liquid at body temperature and therefore melt in the rectum or vaginal cavity and release the active compound.

[0809] Solid dosage forms for oral administration include capsules, tablets, pills, powders, and granules. In such solid dosage forms, the active compound is mixed with at least one inert, pharmaceutically acceptable excipient or carrier such as sodium citrate or dicalcium phosphate and/or a) fillers or extenders such as starches, lactose, sucrose, glucose, mannitol, and silicic acid, b) binders such as, for example, carboxymethylcellulose, alginates, gelatin, polyvinylpyrrolidinone, sucrose, and acacia, c) humectants such as glycerol, d) disintegrating agents such as agar-agar, calcium carbonate, potato or tapioca starch, alginic acid, certain silicates, and sodium carbonate, e) solution retarding agents such as paraffin, f) absorption accelerators such as quaternary ammonium compounds, g) wetting agents such as, for example, cetyl alcohol and glycerol monostearate, h) absorbents such as kaolin and bentonite clay, and i) lubricants such as talc, calcium stearate, magnesium stearate, solid polyethylene glycols, sodium lauryl sulfate, and mixtures thereof. In the case of capsules, tablets and pills, the dosage form may also comprise buffering agents.

[0810] Solid compositions of a similar type may also be employed as fillers in soft and hard-filled gelatin capsules using such excipients as lactose or milk sugar as well as high molecular weight polyethylene glycols and the like. The solid dosage forms of tablets, dragees, capsules, pills, and granules can be prepared with coatings and shells such as enteric coatings and other coatings well known in the pharmaceutical formulating art. They may optionally contain opacifying agents and can also be of a composition that they release the active ingredient(s) only, or in a certain part of the intestinal tract, optionally, in a delayed manner. Examples of embedding compositions that can be used include polymeric substances and waxes. Solid compositions of a similar type may also be employed as fillers in soft and hard-filled gelatin capsules using such excipients as lactose or milk sugar as well as high molecular weight polyethylene glycols and the like.

[0811] The active compounds can also be in micro-encapsulated form with one or more excipients as noted above. The solid dosage forms of tablets, dragees, capsules, pills, and granules can be prepared with coatings and shells such as enteric coatings, release controlling coatings and other coatings well known in the pharmaceutical formulating art. In such solid dosage forms the active compound may be admixed with at least one inert diluent such as sucrose, lactose or starch. Such dosage forms may also comprise, as is normal practice, additional substances other than inert diluents, e.g., tableting lubricants and other tableting aids such a magnesium stearate and microcrystalline cellulose. In the case of capsules, tablets and pills, the dosage forms may also comprise buffering agents. They may optionally contain opacifying agents and can also be of a composition that they release the active ingredient(s) only, or in a certain part of the intestinal tract, optionally, in a delayed manner. Examples of embedding compositions that can be used include polymeric substances and waxes.

[0812] Dosage forms for topical or transdermal administration of a compound of this invention include ointments, pastes, creams, lotions, gels, powders, solutions, sprays, inhalants or patches. The active component is admixed under sterile conditions with a pharmaceutically acceptable carrier and any needed preservatives or buffers as may be required. Ophthalmic formulation, ear drops, and eye drops are also contemplated as being within the scope of this invention. Additionally, the present invention contemplates the use of transdermal patches, which have the added advantage of providing controlled delivery of a compound to the body. Such dosage forms can be made by dissolving or dispensing the compound in the proper medium. Absorption enhancers can also be used to increase the flux of the compound across the skin. The rate can be controlled by either providing a rate controlling membrane or by dispersing the compound in a polymer matrix or gel.

[0813] Depending upon the particular condition, or disease, to be treated, additional therapeutic agents that are normally administered to treat that condition, may also be present in the compositions of this invention. As used herein, additional therapeutic agents that are normally administered to treat a particular disease, or condition, are known as “appropriate for the disease, or condition, being treated.”

[0814] All features of each of the aspects of the disclosure apply to all other aspects mutatis mutandis. Each of the references referred to herein, including but not limited to patents, patent applications and journal articles, is incorporated by reference herein as though fully set forth in its entirety.

[0815] In order that the disclosure described herein may be more fully understood, the following examples are set forth. It should be understood that these examples are for illustrative purposes only and are not to be construed as limiting this disclosure in any manner.

### EXAMPLES

### General Procedures

### Preparation of Human Monocytes

[0816] Add EDTA to a whole blood sample taken from a human subject, to a final EDTA concentration of 3 mM. Dilute the whole blood 1:1 with isolation buffer (PBS, calcium and magnesium free; supplemented with 2% FBS+3 mM EDTA). Layer 35 ml of diluted blood on top of 15 ml of a Ficoll®-Paque Plus gradient medium with a density of 1.077 g/ml in 50 ml centrifuge tubes. When layering the diluted blood, care should be taken so as not to disturb the gradient. Centrifuge at 400×g for 30 min at room temperature with no break. Using a Pasteur pipette, remove the white layer containing peripheral blood mononuclear cells (PBMCs) that forms after centrifugation. Transfer the white layer material to a clean 50 ml centrifuge tube (maximum 10 ml PBMCs per tube). Add 3× volume of isolation buffer and mix gently by inverting to wash the PBMCs.

[0817] Centrifuge at 300×g for 10 min at room temperature (brake on) to pellet the PBMCs and remove supernatant gently so as to minimize loss of any cells. Each pellet is resuspended in 1 ml of isolation buffer, pooled together, if multiple PBMC samples are used, and the PBMC cells are counted.

[0818] Negative Selection Method—Use an EasySep™ human negative selection monocyte isolation kit to isolate monocytes. Follow the manufacturer provided instructions for isolating the monocytes. Briefly, add a ‘human monocyte isolation cocktail’, included with the EasySep™ kit consisting of an Fc receptor blocking antibody and a combination of monoclonal antibodies that recognize specific cell surface markers, to the human PBMC sample. Add the optional ‘platelet removal cocktail’, included with the EasySep™ kit, to the sample. Incubate for 10 min. Add the magnetic particles included with the EasySep™ kit. Incubate for an additional 10 mi. Place the tube inside the EasySep™ magnet. The non-monocytes are pulled to the side of the tube, and the remaining human monocytes can be decanted and used for multiple experiments as follows.

[0819] Positive Selection Method—Add PBMCs to a mixture containing Miltenyi Biotec® CD14 magnetic microbeads. Add the mixture to a magnetic column according to manufacturer provided instructions, washing away non-CD14+ cells, leaving only CD14+ PBMCs bound to the microbeads. Remove the column from the magnet and flush CD14+ cells with manufacturer recommended buffer solution.

### Antibody Ab-3

[0820] Antibody Ab-3 is a murinized version of a human TREM2 agonist antibody, first described as an engineered variant of antibody 13E7 in PCT Application Publication WO2018/195506A1. Ab-3 has an HC according to SEQ TD NO:2779, an LC according to SEQ TD NO:2780 (as shown in Table 21), and exemplifies an anti-TREM2 antibody having the CDRs according to SEQ ID NOS:10, 23, 81, 330, 331, and 372-374.

TABLE 21
Murinized Anti-TREM2 Antibody Ab-3 Sequences

| Sequence | |
|---|---|
| Description | Amino Acid Sequence |
| Ab-3 HC | EVQLVQSGAEVKKPGESLKISCKGSGYSFTSYWIGWVRQMPG |
| SEQ ID NO: 2779 | KGLEWMGIIYPGDADARYSPSFQGQVTISADKSISTAYLQWSSL |
| | KASDTAMYFCARRRQGIFGDALDFWGQGTLVTVSSAKTTPPS |
| | VYPLAPGSAAQTNSMVTLGCLVKGYFPEPVTVTWNSGSLSSG |
| | VHTFPAVLQSDLYTLSSSVTVPSSTWPSETVTCNVAHPASSTKV |
| | DKKIVPRDCGCKPCICTVPEVSSVFIFPPKPKDVLTITLTPKVTC |
| | VVVDISKDDPEVQFSWFVDDVEVHTAQTQPREEQFGSTFRSVS |
| | ELPIMHQDWLNGKEFKCRVNSAAFPAPIEKTISKTKGRPKAPQ |
| | VYTIPPPKEQMAKDKVSLTCMITDFFPEDITVEWQWNGQPAEN |
| | YKNTQPIMDTDGSYFVYSKLNVQKSNWEAGNTFTCSVLHEGL |
| | HNHHTEKSLSHSPGK |
| Ab-3 LC | EIVMTQSPATLSVSPGERATLSCRASQSVSSNLAWFQQKPGQA |
| SEQ ID NO: 2780 | PRLLIYGASTRATGIPARFSGSGSGTEFTLTISSLQPEDFAVYYCL |
| | QDNNFPPTFGQGTKVDIKRADAAPTVSIFPPSSEQLTSGGASVV |
| | CFLNNFYPKDINVKWKIDGSERQNGVLNSWTDQDSKDSTYSM |
| | SSTLTLTKDEYERHNSYTCEATHKTSTSPIVKSFNRNEC |

### Example 1: The Effects of Antibody TREM2 Agonists on Signaling and Survival in Monocyte-Derived Human Macrophages that have Impaired CSF1R Receptor Signaling Due to an Insufficient Dosage of M-CSF

### A. Surface-Coated TREM2 Agonist Antibody Luminescence Cell Viability Assay

[0821] Monocytes isolated from human blood by magnetic separation are washed, resuspended in culture media and plated in a 96-well, or a 384-well plate that has been precoated with a titration (0.001 pg/ml to 100 μg/ml in ten-fold increments) of a TREM2 agonist antibody or an isotype control overnight at 4° C. Antibody-coated plates are washed with PBS twice, and cells are plated in media with a low concentration of macrophage colony-stimulating factor (M-CSF; Gibco, Cat #PHC9501) or a normal concentration of M-CSF. The appropriate low and normal concentrations levels are determined experimentally by testing various levels of M-CSF that yield maximal survival of the cultured macrophages (normal) and hindered survival (low). Exemplary concentrations are 5 ng/ml M-CSF for the low concentration wells and 10 ng/ml for the normal concentration wells. After 5 days, cellular ATP levels are measured via luminescence detection to indicate cell viability using a CellTiter-Glo® Luminescent Cell Viability Assay (Promega Catalog Number G7571). The effects of the TREM2 agonist antibody vs control on the viable cell count of macrophages cultured in the presence of low or normal levels of M-CSF are compared.

### B. Solvated TREM2 Agonist Antibody Luminescence Cell Viability Assay

[0822] Monocytes isolated from human blood by magnetic separation are washed, resuspended in culture media and plated in a 96-well, or a 384-well cell culture plate. Cells are plated in media with a low concentration of M-CSF (Gibco, Cat #PHC9501) or a normal concentration of M-CSF. The appropriate low and normal concentrations levels are determined experimentally by testing various levels of M-CSF that yield maximal survival of the cultured macrophages (normal) and hindered survival (low). Exemplary concentrations are 5 ng/ml M-CSF for the low concentration wells and 10 ng/ml for the normal concentration wells. At the start of plating, Trem2 agonist antibody or an isotype control is added to each cell at concentrations ranging from 0.01 nM to 10 μM in 3-fold increments. After 5 days, cellular ATP levels are measured via luminescence detection to indicate cell viability using a CellTiter-Glo® Luminescent Cell Viability Assay (Promega Catalog Number G7571). The effects of the TREM2 agonist antibody vs control on the viable cell count of macrophages cultured in the presence of low or normal levels of M-CSF are compared.

### C. Solvated TREM2 Agonist Antibody Cell Viability Determined by Automated Microscopy

[0823] Monocytes isolated from human blood by magnetic separation are washed, resuspended in culture media and plated in a 96-well, or a 384-well cell culture plate. Cells are plated in media with a low concentration of M-CSF (Gibco, Cat #PHC9501) or a normal concentration of M-CSF. The appropriate low and normal concentrations levels are determined experimentally by testing various levels of M-CSF that yield maximal survival of the cultured macrophages (normal) and hindered survival (low). Exemplary concentrations are 5 ng/ml M-CSF for the low concentration wells and 10 ng/ml for the normal concentration wells. At the start of plating, TREM2 agonist antibody or an isotype control is added to each cell at concentrations ranging from 0.01 nM to 10 μM in 3-fold increments. Each day, cells are counted by automated microscopy (for instance using a Scintica® C100 automated cell counter), or by flow cytometry analysis on cell stained for viability with propidium iodide, or by any equivalent method, and the effect of treatment with the TREM2 agonist antibody on viable cell numbers is measured. The effects of the TREM2 agonist antibody vs control on viable cell numbers of macrophages cultured in the presence of low or normal levels of M-CSF are compared.

### D. Solvated TREM2 Agonist Antibody-Phospho-SYK Assay

[0824] Monocytes isolated from human blood by magnetic separation are washed, resuspended in culture media and plated in a 96-well, or a 384-well cell culture plate. Cells were plated in media with a low concentration of M-CSF (Gibco, Cat #PHC9501) or a normal concentration of M-CSF. The appropriate low and normal concentrations levels are determined experimentally by testing various levels of M-CSF that yield maximal survival of the cultured macrophages (normal) and hindered survival (low). Exemplary concentrations are 5 ng/ml M-CSF for the low concentration wells and 10 ng/ml for the normal concentration wells. At the start of plating, TREM2 agonist antibody or an isotype control were added to each cell at concentrations ranging from 0.01 nM to 10 μM in 3-fold increments. After 5 days, cells are washed, lysed with M-PER™ reagent (Thermo Scientific) and aliquots of the lysate were analyzed for levels of phospho-SYK using the AlphaLisa® platform, and the reagent kit AlphaLISA® SureFire Ultra p-Syk (Tyr525/526) (Perkin Elmer, part number ALSU-PSYK-A-HV). The effects of TREM2 agonist antibody vs control on phosphorylation levels of SYK, as a measure of signaling, in macrophages cultured in the low or normal levels of M-CSF are compared.

[0825] The above protocols A-D are first carried out with donated human monocytes of no known disease-associated genotype, and repeated with monocytes from ALSP patients carrying a mutation in one allele of the CSF1R gene (CSF1R+/− haploinsufficient monocytes). For experiments using monocytes from ALSP patients, only normal amounts of M-CSF are used, as CSF1R function is already impaired.

[0826] The above protocols can be adapted to test the effects of any TREM2 agonist antibodies on macrophage cell viability and signaling, including, but not limited to TREM2 agonist antibodies disclosed herein.

### E. Effects of CSF1 Withdrawal on Survival and Morphology in Human Monocyte Derived Macrophages

[0827] PBMCs were isolated from fresh, whole blood from human donors. CD14+ monocytes were isolated using positive magnetic selection (Miltenyi). Cells were plated in UpCell® low-adhesion plates and incubated in culture media with 50 ng/mL CSF1 for 48 hours. After 48 hours, cells were non-enzymatically harvested and plated at 25,000 cells per well in cell culture plates coated with 0.4, 2.0, or 10 μg/mL of either Ab-3 or a matching isotype control, and incubated in a humidified incubator at 37C, 5% CO₂ for 72 hours. Caspase-3/7 Green reporter dye was included in the some wells to determine the number of apoptotic events over time. During incubation, cells were monitored every two hours using an Incucyte S3® analyzer (2 fields of view per well, imaged at 10×). Confluence levels were determined using the Incucyte® software, and normalized to CSF1 at 50 ng/mL, which was considered as normal culture conditions. Caspase 3/7 positive counts per field of view were calculated using Incucyte® software. Significance was determined by Ordinary One-Way ANOVA, using multiple comparisons in Graphpad Prism.

[0828] Ab-3 was tested at three different CSF1 concentrations for its ability to inhibit CSF1 withdrawal-induced reduction in confluence in human monocyte-derived macrophages (hMDMs) derived from two different donors. As seen in FIG. 1 (showing macrophages taken from “donor 16”) and FIG. 2 (showing macrophages taken from “donor 26”), withdrawal of CSF1 from the media resulted in a significant decrease in confluence (“CSF1 0 ng/mL”). Treatment of cells with Ab-3 increased confluence levels to that of high CSF1 treated cells (“CSF1 50 ng/mL”), while treatment with isotype matched IgG (having no agonism of hTREM2) at the same concentrations had no significant effect on confluence. These results demonstrate that in hMDM from both donors, reduction of CSF1R signaling decreased confluence, and this confluence decrease was rescued by Ab-3-mediated agonism of TREM2.

[0829] Ab-3 was also tested at three different CSF1 concentrations for its ability to inhibit CSF1 withdrawal-induced apoptosis in hMDMs derived from the two different donors. As seen in FIG. 3 (showing macrophages taken from “donor 16”) and FIG. 4 (showing macrophages taken from “donor 26”), complete withdrawal of CSF1 from the media resulted in a significant increase in Caspase 3/7 staining (“CSF1 0 ng/mL”). Treatment of cells with Ab-3 reduced Caspase 3/7 levels to that of high CSF1 treated cells (“CSF1 50 ng/mL”), while treatment with isotype matched IgG at the same concentrations had no significant effect on levels of Caspase 3/7. These results demonstrate that in hMDM from both donors, reduction of CSF1R signaling increased apoptosis, and this increase in apoptosis was rescued by Ab-3-mediated agonism of TREM2.

### Example 2: The Effects of Antibody TREM2 Agonists on Signaling and Survival in Monocyte-Derived Human Macrophages that have Impaired CSF1R Receptor Signaling Through the Use of a Chemical Inhibitor of CSF1R

### A. Surface-Coated TREM2 Agonist Antibody Luminescence Cell Viability Assay

[0830] Monocytes isolated from human blood by magnetic separation are washed, resuspended in culture media and plated in a 96-well, or a 384-well plate that has been precoated with a titration (0.001 μg/ml to 100 μg/ml in ten-fold increments) of TREM2 agonist antibody or an isotype control overnight at 4° C. Antibody-coated plates are washed with PBS twice, and cells are plated in media with experimentally determined normal levels of M-CSF (e.g. 10 ng/ml M-CSF) and in the presence or absence of CSF1R inhibitor PLX5622 (Medchem express). After 5 days, cellular ATP levels are measured via luminescence detection to indicate cell viability using a CellTiter-Glo® Luminescent Cell Viability Assay (Promega Catalog Number G7571). The effects of the TREM2 agonist antibody vs control on viable cell count of macrophages cultured in the presence or absence of PLX5622 are compared.

### B. Solvated TREM2 Agonist Antibody Luminescence Cell Viability Assay

[0831] Monocytes isolated from human blood by magnetic separation are washed, resuspended in culture media and plated in a 96-well, or a 384-well cell culture plate. Cells are plated in media with experimentally determined normal levels of M-CSF (e.g. 10 ng/ml M-CSF). At the start of plating, the CSF1R inhibitor PLX5622 (Medchem express) is added to the wells at concentrations ranging from 0.01 nM to 10 μM in 3-fold increments. TREM2 agonist antibody or an isotype control is also added to the wells at concentrations ranging from 0.01 nM to 10 μM in 3-fold increments. After 5 days, cellular ATP levels are measured via luminescence detection to indicate cell viability using a CellTiter-Glo® Luminescent Cell Viability Assay (Promega Catalog Number G7571). The effects of the TREM2 agonist antibody vs control on viable cell count of macrophages cultured in the presence or absence of PLX5622 are compared.

### C. Solvated TREM2 Agonist Antibody Cell Viability Determined by Automated Microscopy

[0832] Monocytes isolated from human blood by magnetic separation are washed, resuspended in culture media and plated in a 96-well, or a 384-well cell culture plate. Cells are plated in media with experimentally determined normal levels of M-CSF (e.g. 10 ng/ml M-CSF). At the start of plating, the CSF1R inhibitor PLX5622 (Medchem express) is added to the wells at concentrations ranging from 0.01 nM to 10 μM in 3-fold increments. TREM2 agonist antibody or an isotype control is also added to the wells at concentrations ranging from 0.01 nM to 10 μM in 3-fold increments. Every day, cells are counted by automated microscopy, and the effect of treatment with TREM2 agonist antibody on cell numbers is measured. The effects of the TREM2 agonist antibody vs control on viable cell counts of macrophages cultured in the presence or absence of PLX5622 are compared.

### D. Solvated TREM2 Agonist Antibody-Phospho-SYK Assay

[0833] Monocytes isolated from human blood by magnetic separation are washed, resuspended in culture media and plated in a 96-well, or a 384-well cell culture plate. Cells are plated in media with experimentally determined normal levels of M-CSF (e.g. 10 ng/ml M-CSF). At the start of plating, the CSF1R inhibitor PLX5622 (Medchem express) is added to the wells at concentrations ranging from 0.01 nM to 10 μM in 3-fold increments. TREM2 agonist antibody or an isotype control is also added to the wells at concentrations ranging from 0.01 nM to 10 μM in 3-fold increments. After 5 days, cells are washed, lysed with M-PER™ reagent (Thermo Scientific) and aliquots of the lysate were analyzed for levels of phospho-SYK using the AlphaLisa® platform, and the reagent kit AlphaLISA® SureFire Ultra p-Syk (Tyr525/526) (Perkin Elmer, part number ALSU-PSYK-A-HV). The effects of TREM2 agonist antibody vs control on phosphorylation levels of SYK, as a measure of signaling, in macrophages cultured in the presence or absence of PLX5622 are compared.

[0834] The above protocols A-D are first carried out with donated human monocytes of no known disease-associated genotype, and repeated with monocytes from ALSP patients carrying a mutation in one allele of the CSF1R gene (CSF1R+/− haploinsufficient monocytes) for comparison. In experiments using monocytes from ALSP patients, CSF1R inhibitor PLX5622 is not used, as CSF1R signaling is already inhibited.

[0835] The above protocols can be adapted to test the effects of any TREM2 agonist antibodies on macrophage cell viability and signaling, including, but not limited to TREM2 agonist antibodies disclosed herein.

### E. Effects of CSF1 Receptor Inhibition on Morphology in Human Monocyte Derived Macrophages

[0836] PBMCs were isolated from fresh, whole blood from human donors. CD14+ monocytes were isolated using positive magnetic selection (Miltenyi). Cells were plated in UpCell® low-adhesion plates and incubated in culture media with 50 ng/mL CSF1 for 48 hours. After 48 hours, cells were non-enzymatically harvested and plated at 25,000 cells per well in cell culture plates coated with 10 μg/mL of either Ab-3 or a matching isotype control. PLX5622 was immediately added to the cultures to 1 μM, and plates were incubated in a humidified incubator at 37 C, 5% CO₂ for an additional 96 hours. During incubation, cells were monitored every two hours using an Incucyte S3® analyzer (2 fields of view per well, imaged at 10×). Confluence was measured using built in S3 software, while area and eccentricity (cell shape) were measured using the built in “Cell By Cell” analysis software. Significance was determined by Student's T-test, two-tailed in Graphpad Prism.

[0837] Ab-3 was tested at 10 μg/mL for its ability to inhibit the effects of PLX5622-induced CSF1R inhibition on morphology. As seen in FIG. 5, inhibition of CSF1R by PLX5622 resulted in a significant reduction in confluence (“PLX5622 1 μM”) relative to vehicle alone. Treatment of cells with Ab-3 resulted in restoration of confluence to levels similar to that of vehicle alone, while treatment with isotype matched IgG at the same concentration had no significant effect. In addition, a cell-by-cell assessment was carried out to quantify cell shape, specifically determining the percentage of the cell population that is rounded (amoeboid) as compared to cells that are “high area, high eccentricity” (ramified). As shown in FIG. 6, inhibition of CSF1R by PLX5622 resulted in a significant reduction in cells with “high area, high eccentricity” (“PLX5622 1 μM”) relative to vehicle alone. Treatment of cells with Ab-3 resulted in restoration of “high area, high eccentricity” to levels higher than that of vehicle alone, while treatment with isotype matched IgG at the same concentration had no significant effect.

[0838] In addition, it was found that changes in confluence were not due to cell count in donors with no PLX5622-dependent apoptosis, but were instead due to changes in morphology. This effect is shown in FIG. 7. The Incucyte S3 includes a “Cell By Cell” module that can quantify cell shape, specifically what percentage of the cell population are rounded (amoeboid) as compared to cells that are “high area, high eccentricity” (ramified). Inhibition of CSF1R by PLX5622 resulted in a significant reduction in cells with “high area, high eccentricity” (“PLX5622 1 μM”) relative to vehicle alone. Treatment of cells with Ab-3 resulted in restoration of “high area, high eccentricity” to levels higher than that of vehicle alone, while treatment with isotype matched IgG at the same concentration had no significant effect.

[0839] These results demonstrate that reduction of CSF1R signaling by PLX5622 reduced cellular confluence, and this effect was rescued by agonism of TREM2 signaling by Ab-3.

### Example 3: The Effects of Small Molecule TREM2 Agonists on Signaling and Survival in Monocyte-Derived Human Macrophages that have Impaired CSF1R Receptor Signaling Due to an Insufficient Dosage of M-CSF

### A. Luminescence Cell Viability Assay

[0840] Monocytes isolated from human blood by magnetic separation are washed, resuspended in culture media and plated in a 96-well, or a 384-well cell culture plate. Cells are plated in media with a low concentration of M-CSF (Gibco, Cat #PHC9501) or a normal concentration of M-CSF. The appropriate low and normal concentrations levels are determined experimentally by testing various levels of M-CSF that yield maximal survival of the cultured macrophages (normal) and hindered survival (low). Exemplary concentrations are 5 ng/ml M-CSF for the low concentration wells and 10 ng/ml for the normal concentration wells. At the start of plating, a TREM2 small molecule agonist or DMSO control is added to each cell at concentrations ranging from 0.01 nM to 10 μM in 3-fold increments. After 5 days, cellular ATP levels are measured via luminescence detection to indicate cell viability using a CellTiter-Glo® Luminescent Cell Viability Assay (Promega Catalog Number G7571). The effects of the small molecule TREM2 agonist vs DMSO control on viable cell count of macrophages cultured in the presence of low or normal levels of M-CSF are compared.

### B. Cell Viability Determined by Automated Microscopy

[0841] Monocytes isolated from human blood by magnetic separation are washed, resuspended in culture media and plated in a 96-well, or a 384-well cell culture plate. Cells are plated in media with a low concentration of M-CSF (Gibco, Cat #PHC9501) or a normal concentration of M-CSF. The appropriate low and normal concentrations levels are determined experimentally by testing various levels of M-CSF that yield maximal survival of the cultured macrophages (normal) and hindered survival (low). Exemplary concentrations are 5 ng/ml M-CSF for the low concentration wells and 10 ng/ml for the normal concentration wells. At the start of plating, a TREM2 small molecule agonist or DMSO control is added to each cell at concentrations ranging from 0.01 nM to 10 μM in 3-fold increments. Every day, cells are counted by automated microscopy, and the effects of treatment on cell numbers was measured. The effects of the small molecule TREM2 agonist vs DMSO control on macrophages cultured in the presence of low or normal levels of M-CSF are compared.

### C. Phospho-SYK Assay

[0842] Monocytes isolated from human blood by magnetic separation are washed, resuspended in culture media and plated in standard a 96-well, or a 384-well cell culture plate. Cells are plated in media with a low concentration of M-CSF (Gibco, Cat #PHC9501) or a normal concentration of M-CSF. The appropriate low and normal concentrations levels are determined experimentally by testing various levels of M-CSF that yield maximal survival of the cultured macrophages (normal) and hindered survival (low). Exemplary concentrations are 5 ng/ml M-CSF for the low concentration wells and 10 ng/ml for the normal concentration wells. At the start of plating, a TREM2 small molecule agonist or DMSO control is added to each cell at concentrations ranging from 0.01 nM to 10 μM in 3-fold increments. After 5 days, cells are washed, lysed with M-PER™ reagent (Thermo Scientific) and aliquots of the lysate were analyzed for levels of phospho-SYK using the AlphaLisa® platform, and the reagent kit AlphaLISA® SureFire Ultra p-Syk (Tyr525/526) (Perkin Elmer, part number ALSU-PSYK-A-HV). The effects of the small molecule TREM2 agonist vs DMSO control on phosphorylation levels of SYK, as a measure of signaling, macrophages cultured in the low or normal levels of M-CSF were compared.

[0843] The above protocols A-C are first carried out with donated human monocytes of no known disease-associated genotype, and repeated with monocytes from ALSP patients carrying a mutation in one allele of the CSF1R gene (CSF1R+/− haploinsufficient monocytes). For experiments using monocytes from ALSP patients, only normal amounts of M-CSF are used, as CSF1R function is already impaired.

[0844] The above protocols A-C can be repeated to test the effects of other any small molecule TREM2 agonist on macrophage cell viability and signaling, including, but not limited to small molecule TREM2 agonists disclosed herein.

### Example 4: The Effects of Small Molecule TREM2 Agonists on Signaling and Survival in Monocyte-Derived Human Macrophages that have Impaired CSF1R Receptor Signaling Through the Use of a Chemical Inhibitor of CSF1R

### A. Luminescence Cell Viability Assay

[0845] Monocytes isolated from human blood by magnetic separation are washed, resuspended in culture media and plated in a 96-well, or a 384-well cell culture plate. Cells are plated in media with experimentally determined normal levels of M-CSF (e.g. 10 ng/ml M-CSF). At the start of plating, the CSF1R inhibitor PLX5622 (Medchem express) is added to the wells at concentrations ranging from 0.01 nM to 10 μM in 3-fold increments. A small molecule TREM2 agonist or DMSO control is also added to the wells at concentrations ranging from 0.01 nM to 10 μM in 3-fold increments. After 5 days, cellular ATP levels are measured via luminescence detection to indicate cell viability using a CellTiter-Glo® Luminescent Cell Viability Assay (Promega Catalog Number G7571). The effects of a small molecule TREM2 agonist vs DMSO control on macrophages cultured in the presence of PLX5622 were compared.

### B. Cell Viability Determined by Automated Microscopy

[0846] Monocytes isolated from human blood by magnetic separation are washed, resuspended in culture media and plated in a 96-well, or a 384-well cell culture plate. Cells are plated in media with experimentally determined normal levels of M-CSF (e.g. 10 ng/ml M-CSF). At the start of plating, the CSF1R inhibitor PLX5622 (Medchem express) is added to the wells at concentrations ranging from 0.01 nM to 10 μM in 3-fold increments. A small molecule TREM2 agonist or DMSO control is also added to the wells at concentrations ranging from 0.01 nM to 10 μM in 3-fold increments. Every day, cells are counted by automated microscopy, and the effects of treatment on cell numbers is measured. The effects of the small molecule TREM2 agonist vs DMSO control on macrophages cultured in the presence or absence of PLX5622 are compared.

### C. Phospho-SYK Assay

[0847] Monocytes isolated from human blood by magnetic separation are washed, resuspended in culture media and plated in a 96-well, or a 384-well cell culture plate. Cells are plated in media with experimentally determined normal levels of M-CSF (e.g. 10 ng/ml M-CSF). At the start of plating, the CSF1R inhibitor PLX5622 (Medchem express) is added to the wells at concentrations ranging from 0.01 nM to 10 μM in 3-fold increments. A small molecule TREM2 agonist or DMSO control is also added to the wells at concentrations ranging from 0.01 nM to 10 μM in 3-fold increments. After 5 days, cells are washed, lysed with M-PER™ reagent (Thermo Scientific) and aliquots of the lysate were analyzed for levels of phospho-SYK using the AlphaLisa® platform, and the reagent kit AlphaLISA® SureFire Ultra p-Syk (Tyr525/526) (Perkin Elmer, part number ALSU-PSYK-A-HV). The effects of the small molecule TREM2 agonist vs DMSO control on phosphorylation levels of SYK, as a measure of signaling, macrophages cultured in the presence or absence of PLX5622 were compared.

[0848] The above protocols A-C are first carried out with donated human monocytes of no known disease-associated genotype, and repeated with monocytes from ALSP patients carrying a mutation in one allele of the CSF1R gene (CSF1R+/− haploinsufficient monocytes) for comparison. In experiments using monocytes from ALSP patients, CSF1R inhibitor PLX5622 is not used, as CSF1R signaling is already inhibited.

[0849] The above protocols A-C can be repeated to test the effects of other any small molecule TREM2 agonist on macrophage cell viability and signaling, including, but not limited to small molecule TREM2 agonists disclosed herein.

### Example 5. The Effects of a TREM2 Agonist on Numbers, Survival, Proliferation and Signaling in a hTREM2 KI Mouse Model Treated with a Small Molecule CSF1R Inhibitor

[0850] Male transgenic mice containing a knockout at the mouse TREM2 locus, and with the human TREM2 (hTREM2) gene inserted, are treated with a CSF1R small molecule inhibitor. For long term dosing to impair microglia, the compound PLX5622 is formulated in AIN-76A standard chow by Research Diets Inc. at 1200 ppm (PLX5622).

### A. Microglia Population Numbers

[0851] After 10 weeks of treatment with PLX5622, mice are dosed with IP injections of TREM2 agonist or control (vehicle when TREM2 agonist antibodies are used, DMSO when TREM2 small molecule agonists are used) for a week, where dosing occurs every 3d. At the end of this treatment week, animals are terminated and the number of microglia present in multiple brain regions is analyzed. Treatment with PLX5622 results in loss of microglia in the brains of treated mice; treatment with TREM2 agonist restores microglia numbers. For all studies, brains are removed, and hemispheres separated along the midline. Brain halves are drop-fixed in 4% paraformaldehyde (Thermo Fisher Scientific, Waltham, MA) for immunohistochemical analysis. Fixed half brains are sliced at 40 m using a Leica SM2000R freezing microtome. The flash-frozen hemispheres are microdissected into cortical, hippocampal, and thalamic/striatal regions and then ground with a mortar and pestle to yield a fine powder. Total microglia and plaque counts/volumes are obtained by imaging comparable sections of tissue from each animal at the ×10, ×20, or ×63 objective, at multiple z-planes, followed by automated analyses using Bitplane Imaris 7.5 spots or surfaces modules, respectively. Results are recorded as the total number of microglia in different brain regions. The effects of the TREM2 agonist vs control treatment on numbers of microglia in brain regions are compared.

### B. Gene Expression

[0852] Treatment with PLX5622 results in altered gene expression in the microglia of treated mice, reflecting impaired trophic survival pathways. After 10 w of treatment with PLX5622, mice are dosed with TREM2 agonist (5-60 mpk oral doses daily) or control (vehicle for antibody TREM2 agonists, DMSO for small molecule TREM2 agonists) for a week. At the end of this week, animals are terminated, and the animal brains are processed as follows. Debris and myelin are removed using a modified cold Percoll® gradient: Cell pellets are resuspended in 10 mL (total) of ice cold 40% Percoll® (Sigma) diluted in HBSS and then spun for 30 min at 500 g with full acceleration and braking. Using this approach, the microglia pellet at the bottom of the 15 mL tube and the Percoll® and myelin are then removed by vacuum suction. The cell pellet is washed with 10 mL of ice cold HBSS and spun again for 5 min at 300 g at 4° C. All samples were then resuspended in 500 ml of ice cold FACS buffer (0.5% BSA, 1 mM EDTA, in 1×PBS, Sterile Filtered) containing Cd11b (PE), CD45 (APC-Cy7), and Cx3cr1 (APC) antibodies (from Biolegend®) at a 1:200 dilution for 30 min on ice. Samples are then washed in 10 mL of ice cold FACS buffer and spun down for 5 min at 300 g and then resuspended in 500 ml of ice cold FACS buffer. Pre-chilled 96 well plates (Eppendorf) are precoated with FACS buffer for 1 hour on ice and then all but 5 ml of FACS buffer is removed from each well. Plates are kept on ice until the respective sample is ready to sort. 12,000-15,000 microglia are then sorted on a BD FACSAria II using the 70 micron nozzle with purity mode into individual wells with a sort speed of approximately 10,000 events per second. Each sample takes approximately 5-10 min to sort. After sorting one sample the plate is immediately put back on ice. The resulting volume in each well is approximately 20 ml depending on the number of cells sorted. FACS purified microglia are sequenced using the Chromium™ single cell gene expression platform (10× Genomics). Approximately 10,000-13,000 microglia from each sample are directly loaded into each sample well following manufacturer instructions and combined into droplets with barcoded beads using the Chromium™ controller. Manufacturer specifications are followed for generation of the barcoded libraries and then the samples are sequenced to an average depth of 40,000-60,000 reads on an Illumina Nextseq® 500 sequencer.

[0853] Sequenced samples are processed using the Cell Ranger 1.2 pipeline and aligned to the GRCm38 (mm10) mouse reference genome. For each sample a digital gene expression matrix (DGE) is generated containing the raw UMI counts for each cell in a given sample. DGEs from each sample are then merged and processed using the independent component analysis (ICA) based platform. Cell with fewer than 650 detected genes/cell and genes that are expressed by fewer than 20 cells (0.025% of all cells in the dataset) are removed before identification of variable genes in the dataset, cell centering and scaling, and generation of independent components (ICs). For the total dataset analysis two rounds of ICA are performed. In the first round, 50 ICs are generated. The goal of the first round of clustering analysis is to identify (and remove) contaminating cell types using well-established markers for neurons and other brain cell types. Following this stage, a second round of ICA is performed using 40 ICs on microglia and immune cells. ICs corresponding to batch or replicate effects are removed from analysis, and the cells are then clustered based on their values for the remaining ICs. A clustering resolution parameter value of 0.8 is used. For each analysis ICs are curated and assigned to one of the following categories: ICs for which high-scoring cells express markers of other cell types (“doublets”); ICs for which fewer than 5 cells have high cell loading scores (“outliers”); noisy ICs or ICs that correlate with batch or individual sample replicate (“artifacts”); or ICs to be used for subsequent clustering analysis (“real”). Genes that define each cluster of microglia are those that exceed a minimum threshold of 1.5 fold change and a P value less than 1E-4 and are adjusted using Benjamini-Hochberg false discovery rate (FDR) correction. After initial processing gene expression is compared between different treatments and subjected to pathway analysis and microglia cells are categorized based on cell-cycle/proliferation state and state of polarization/differentiation. The effects of the TREM2 agonist vs control treatment on total gene expression of microglia, and on activity of gene pathways involved in survival and proliferation, in brain regions are compared.

### Example 6. Neurofilament Light Chain as a Biomarker for Tracking ALSP Treatment Efficacy

[0854] Monitoring of serum from patients with ALSP for levels of neurofilament light chain (NfL) in order to select patients for treatment, and to monitor the efficacy of treatment will be done as follows. Serum is collected from patients at various time points as required for the use. Serum is stored in sample aliquots at −80° C. When ready for analysis, samples are thawed on ice. Measurement of NfL is determined using an assay run on a Simoa® HD-1 instrument (QUANTERIX) using a 2-step Assay Neat 2.0 protocol; 100 μl of sample or calibrator (diluent: Tris-buffered saline [TBS], 0.1% Tween 20, 1% milk powder, 400 μg/ml Heteroblock [Omega Biologicals, Bozeman, MT]), 25 μl conjugated beads (diluent: TBS, 0.1% Tween 20, 1% milk powder, 300 μg/ml Heteroblock), and 20 μl of mAB 2:1 (0.1 pg/ml; diluent: TBS, 0.1% Tween 20, 1% milk powder, 300 ug/ml Heteroblock) are incubated for 47 cadences (1 cadence=45 seconds). After washing, 100 μl of streptavidin-conjugated b-galactosidase (150 pM; Quanterix) is added, followed by a 7-cadence incubation and a wash. Prior to reading, 25 μl resorufin b-D-galactopyranoside (QUANTERIX) is added. Calibrators (neat) and samples (serum: 1:4 dilution) are measured in duplicates. Bovine lyophilized NfL is obtained from UmanDiagnostics. Calibrators ranged from 0 to 2,000 pg/ml for serum and from 0 to 10,000 pg/ml for CSF measurements. Batch prepared calibrators are stored at −80° C. Final NfL levels measured by the above method are used to help both select patients to treat with an agonist of TREM2 and guide response to treatment with an agonist of TREM2.

### Example 7. In Vivo Model of Cuprizone-Induced Demyelination

[0855] R47H hTREM2^{+/+} KI mice (on mTREM2^{-/-} KO background) are utilized in a study using the cuprizone model to study the effects of dosing with a TREM2 agonist antibody. Mice are maintained under controlled conditions (19-22° C. and in a 12-h light/dark cycle with unrestricted access to food and water). The objective of this study is to evaluate the effects of two doses of Cuprizone (Cpz) on brain Iba1 and dMBP expression in TREM2 R47H KI mice vs. corresponding wild-type (WT) mice, and to test the effects of additional dosing with aTREM2 agonist (antibody or small molecule) on the Iba1 and dMBP measurements.

[0856] Reversible demyelination in mouse brain areas are induced by twice-daily oral gavages of Cpz for 5 weeks (35 days). The daily Cpz dose are 300 mg/kg, administered in two separate gavages (morning and evening), starting on DO. To avoid premature terminations/deaths due to excessively induced model, the Cpz challenge in this study are commenced to the mice while at 9-12 weeks of age, weighing>20 g. If any of the mice upon DO weighed less than 20 g, it would be more prone to premature death or termination due to excess weight loss—a major model-related symptom. Therefore, mice with BW under the critical weight are assigned to the Vehicle groups.

[0857] After the last Cpz dosing day (D34), the mice are terminally anesthetized and perfusion-fixed, followed by collecting of the brain to prepare cryo-blocks. Three series of sections (8 sections/series) are cut, and immunohistochemistry with anti-Iba1 and anti-degraded Myelin Basic Protein antibody (anti-dMBP) are performed, to assess the intensity of inflammation and demyelination (respectively) in the corpus callosum of Cpz exposed mice.

[0858] 8-24 w old mice are dosed PO BID by oral gavage with cuprizone for 5 weeks (WK 5) or for 5 weeks followed by 3 days (WK5+3D), or 7 days (WK5+7D), with no cuprizone. TREM2 agonist is administered once weekly, starting at four days before the first dose of cuprizone, by IP, at a dose of 100 mpk.

[0859] Treatment arms are as follows:
[0860] 1. WT+Vehicle (n=6)
[0861] 2. WT+CPZ+Vehicle, termination 4 d after stopping cpz (n=12)
[0862] 3. WT+CPZ+Vehicle, termination 7 d after stopping cpz (n=12)
[0863] 4. KI+CPZ+Vehicle, termination 4 d after stopping cpz (n=12)
[0864] 5. KI+CPZ+Vehicle, termination 7 d after stopping cpz (n=12)
[0865] 6. KI+CPZ+TREM2 Agonist Treated, termination 4 d after stopping cpz (n=12)
[0866] 7. KI+CPZ+TREM2 Agonist Treated, termination 7 d after stopping cpz (n=12)

[0867] At the end of the experiment for each arm described above, mice are perfused with 4% paraformaldehyde. Mouse brains are removed and post-fixed in 4% PFA for 24 h, followed by immersion in 30% sucrose for 48 h, then embedded in Optimal Cutting Temperature (OCT). 5-μm sections are placed on glass slides and stained with solochrome cyanine to confirm the presence of a lesion. Sections are stained with the following primary antibodies: Rb anti-dMBP (Millipore, ab5864, 1:2000), and Rb anti-IBA1 (Wako, 019-19741, 1:600). AlexaFluor-conjugated secondary antibodies (Invitrogen, 1:1000) were used. Images are acquired with a Nikon Eclipse 90i fluorescent and bright field microscope equipped with 10× and 20× zoom objectives and analyzed with Metamorph 7.7 software. dMBP is analyzed as the percentage area of positive staining (number of positive pixels/mm2) within the region of interest.

[0868] Immunohistochemical (IHC) analysis is performed to count the number of IBA1 positive cells for each treatment. Additionally, amounts of dMBP are quantitated for each treatment arm and compared.

### Example 8. Profiling of ALSP Patient PBMCs

[0869] It has been shown in a small study of 4 patients with ALSP that peripherally derived monocytes had elevated expression levels of CCR2, CX3CR1, CD62L, CD80 and CD86 compared to healthy control subjects. Furthermore, ALSP patient peripheral blood monocytes (PBMCs) stimulated with lipopolysaccharide (LPS) produced higher amounts of TNFa than healthy controls and significantly lower amounts of IL-10 as measured by flow cytometry using intracellular staining (Hamatani et al. Neurobiology of Disease, 2019, 140, 104867). The experiments disclosed below test the effect of TREM2 agonist treatment on the expression levels of the aforementioned proteins in the PBMCs of ALSP patients.

### Sample Collection & Gating

[0870] Peripheral blood mononuclear cells (PBMCs) are collected as described by Okada et al., J. Autoimmun., 88 (2018), 103-113. For surface molecule examination, untouched monocytes are enriched from PBMCs using minimal labeling of unwanted cells by magnetic cell separation (Pan Monocyte Isolation Kit, human; Miltenyi Biotec, Auburn, CA, USA) and stained with anti-human CD14 (clone 63D3), CD16 (clone 3G8), CD64 (clone 10.1), CD80 (clone 2D10), CD86 (clone IT2.2), CD62L (clone DREG-56), CX3CR1 (clone 2A9-1), and CCR2 (clone K036C2) antibodies conjugated to peridinin chlorophyll protein-cyanine 5.5 (PerCP/Cy5.5), phycoerythrin (PE), allophycocyanin (APC), fluorescein isothiocyanate (FITC), Pacific Blue, APC-cyanine7 (Cy7), PE/Cy7, and APC, respectively (all purchased from BioLegend, San Diego, CA, USA) according to the manufacturer's protocol. Data is acquired using a FACS Canto II flow cytometer (BD Biosciences, San Jose, CA, USA) and analyzed with FlowJo software (TreeStar, Ashland, OR, USA). Mean fluorescence intensity (MFI) is calculated for quantification of protein expression.

[0871] Monocytes are gated according to forward scatter, side scatter, and expression of CD14 and CD16 after exclusion of doublets. After incubation in the presence of each stimulus described below, CD14-positive cells are analyzed after gating in the forward scatter/side scatter plot, because CD16 expression is reduced after incubation.

### Response to M-CSF GM-CSF+/−TREM2 Agonist

[0872] To examine responses of healthy donor compared to ALSP patient PB derived monocytes, cells are exposed to macrophage colony-stimulating factor (M-CSF) and granulocyte-macrophage colony-stimulating factor (GM-CSF) with and without a TREM2 agonist. Monocytes are cultured in 96-well U-bottom plates at a concentration of 8×10⁴/well for 6 days in 200 l/well Macrophage-SFM (Thermo Fisher Scientific, Tokyo, Japan) with 3-fold serial dilutions of a TREM2 agonist mAb from 100 nM to 0.1 nM or antibody dilution buffer supplemented with 50 units/ml penicillin G and 50 g/ml streptomycin (Penstrep; Thermo Fisher Scientific) and containing either 100 ng/ml human recombinant M-CSF (BioLegend) or 10 ng/ml human recombinant GM-CSF at 37° C. in 5% CO₂. On day 3, half of the medium is replaced with fresh medium containing each CSF and a corresponding concentration of TREM2 agonist or buffer, and after 6 days of incubation, surface molecules (mentioned above) are analyzed with flow cytometry.

### Response to LPS+/−TREM2 Agonist

[0873] PBMCs are cultured at a density of 2×10⁵/well in Macrophage-SFM (Thermo Fisher Scientific) in 96-well U-bottom plates with 3-fold serial dilutions of a TREM2 agonist (for instance a TREM2 agonist mAb from 100 nM to 0.1 nM) or a dilution buffer. Various time points are tested such as 4 hours, 18 hours (overnight), and 48 hours TREM2 agonist treatment or buffer, followed by stimulation for 4 h with 10 g/ml lipopolysaccharide (LPS) (Enzo Life Sciences, Farmingdale, NY, USA) and Brefeldin A solution (eBioscience, Hatfield, UK) at 37° C. in 5% CO₂. Stimulated PBMCs are harvested, washed, and stained with anti-human CD14 PerCP/Cy5.5 (clone 63D3) antibody (BioLegend). For intracellular staining, cells are washed again, fixed, permeabilized, and stained with anti-human antibodies. Anti-human antibodies included anti-IL-10 Alexa Fluor (AF) 647 (JES3-9D7) antibody, anti-tumor necrosis factor (TNF) α AF488 (Mab11) antibody, anti-IL-6 PE/Cy7 (MQ2-13A5) antibody, anti-transforming growth factor (TGF) β Brilliant Violet 421 (TW4-2F8) antibody (all purchased from BioLegend), and anti-IL-12p70 PE (20C2) antibody (BD). Additional intracellular cytokine staining is also explored following a similar protocol. Extracellular cytokines and chemokines are measured by collecting supernatant following the 24 hours of LPS treatment and running MSD multiplex panels according to the manufacturer's specifications.

### ALSP Patient Derived PBMC Gene Expression Response to a TREM2 Agonist

[0874] PBMCs are cultured at a density of 2×10⁵/well in Macrophage-SFM (Thermo Fisher Scientific) in 96-well U-bottom plates with 3-fold serial dilutions of a TREM2 agonist (for instance a TREM2 agonist mAb from 100 nM to 0.1 nM) or a dilution buffer. Various time points are tested such as 4 hours, 18 hours (overnight), and 48 hours following TREM2 agonist treatment or buffer and RNA is isolated. Gene expression of ABCD1, ABCD2, ABCD3, Ch25h and other metabolic and inflammatory genes is performed using qRT-PCR.

### TREM2 Agonist Effect on ALSP Patient Derived PBMC Phagocytosis

[0875] Phagocytosis analysis is performed according to the manufacturer's instructions. PBMCs are incubated with 20 nM, 2 nM and 0.2 nM of TREM2 agonist or dilution buffer for 2 hours or 18 hours. Then, PBMCs are incubated with FITC-labeled bare latex beads or beads coated with rabbit immunoglobulin G (IgG) (Phagocytosis Assay Kit FITC; Cayman Chemical, Ann Arbor, MI, USA) for 2 h. Cells are stained with anti-human CD14 PerCP/Cy5.5 (clone 63D3) (BioLegend), and the percentage of CD14-positive cells that ingested beads is determined as FITC-positive cells.

The application's sequence listing, which the Patent Office published only in electronic form, follows.

SEQUENCE LISTING (2780 sequences)

SEQ ID NO: 1 - protein, 230 aa, Homo sapiens
MEPLRLLILLFVTELSGAHNTTVFQGVAGQSLQVSCPYDSMKHWGRRKAWCRQLGEKGPCQRVVSTHNLWLLSFLRRWNGSTAITDDTLGGTLTITLRNLQPHDAGLYQCQSLHGSEADTLRKVLVEVLADPLDHRDAGDLWFPGESESFEDAHVEHSISRSLLEGEIPFPPTSILLLLACIFLIKILAASALWAAAWHGQKPGTHPPSELDCGHDPGYQLQTLPGLRDT

SEQ ID NO: 2 - protein, 174 aa, Homo sapiens
MEPLRLLILLFVTELSGAHNTTVFQGVAGQSLQVSCPYDSMKHWGRRKAWCRQLGEKGPCQRVVSTHNLWLLSFLRRWNGSTAITDDTLGGTLTITLRNLQPHDAGLYQCQSLHGSEADTLRKVLVEVLADPLDHRDAGDLWFPGESESFEDAHVEHSISRSLLEGEIPFPPTS

SEQ ID NO: 3 - protein, 113 aa, Homo sapiens
MGGLEPCSRLLLLPLLLAVSGLRPVQAQAQSDCSCSTVSPGVLAGIVMGDLVLTVLIALAVYFLGRLVPRGRGAAEAATRKQRITETESPYQELQGQRSDVYSDLNTQRPYYK

SEQ ID NO: 4 - protein, 234 aa, Homo sapiens
MRKTRLWGLLWMLFVSELRAATKLTEEKYELKEGQTLDVKCDYTLEKFASSQKAWQIIRDGEMPKTLACTERPSKNSHPVQVGRIILEDYHDHGLLRVRMVNLQVEDSGLYQCVIYQPPKEPHMLFDRIRLVVTKGFSGTPGSNENSTQNVYKIPPTTTKALCPLYTSPRTVTQAPPKSTADVSTPDSEINLTNVTDIIRVPVFNIVILLAGGFLSKSLVFSVLFAVTLRSFVP

SEQ ID NO: 5 - protein, 14 aa, synthetic construct
  REGION 1..14: note = Description of Artificial Sequence: Synthetic peptide
  REGION 1..14: note = CRDL1 Antibody ID 12G10
TLRSGINVGTYRIY

SEQ ID NO: 6 - protein, 11 aa, synthetic construct
  REGION 1..11: note = Description of Artificial Sequence: Synthetic peptide
  REGION 1..11: note = CDRL1 Antibody ID 26C10
SGDKLGDKYVC

SEQ ID NO: 7 - protein, 17 aa, synthetic construct
  REGION 1..17: note = Description of Artificial Sequence: Synthetic peptide
  REGION 1..17: note = CDRL1 Antibody ID 24C12
KSSRSVLYSSNNKNYLA

SEQ ID NO: 8 - protein, 17 aa, synthetic construct
  REGION 1..17: note = Description of Artificial Sequence: Synthetic peptide
  REGION 1..17: note = CDRL1 Antibody ID 24G6
KSSQSVLYSSNNKHFLA

SEQ ID NO: 9 - protein, 17 aa, synthetic construct
  REGION 1..17: note = Description of Artificial Sequence: Synthetic peptide
  REGION 1..17: note = CDRL1 Antibody ID 24A10
KSSHNVLYSSNNKNYLA

SEQ ID NO: 10 - protein, 11 aa, synthetic construct
  REGION 1..11: note = Description of Artificial Sequence: Synthetic peptide
  REGION 1..11: note = CDRL1 Antibody ID 10E3
RASQSVSSNLA

SEQ ID NO: 11 - protein, 11 aa, synthetic construct
  REGION 1..11: note = Description of Artificial Sequence: Synthetic peptide
  REGION 1..11: note = CDRL1 Antibody ID 25F12
RASQSVNNNLA

SEQ ID NO: 12 - protein, 12 aa, synthetic construct
  REGION 1..12: note = Description of Artificial Sequence: Synthetic peptide
  REGION 1..12: note = CDRL1 Antibody ID 32E3
RASQIISSNYLA

SEQ ID NO: 13 - protein, 12 aa, synthetic construct
  REGION 1..12: note = Description of Artificial Sequence: Synthetic peptide
  REGION 1..12: note = CDRL1 Antibody ID 24F4
RASQSVSSSYLA

SEQ ID NO: 14 - protein, 11 aa, synthetic construct
  REGION 1..11: note = Description of Artificial Sequence: Synthetic peptide
  REGION 1..11: note = CDRL1 Antibody ID 16B8
RASQDINSWLA

SEQ ID NO: 15 - protein, 11 aa, synthetic construct
  REGION 1..11: note = Description of Artificial Sequence: Synthetic peptide
  REGION 1..11: note = CDRL1 Antibody ID 4C5
RASQGISNWLA

SEQ ID NO: 16 - protein, 11 aa, synthetic construct
  REGION 1..11: note = Description of Artificial Sequence: Synthetic peptide
  REGION 1..11: note = CDRL1 Antibody ID 6E7
RASQGISSWLA

SEQ ID NO: 17 - protein, 11 aa, synthetic construct
  REGION 1..11: note = Description of Artificial Sequence: Synthetic peptide
  REGION 1..11: note = CDRL1 Antibody ID 5E3
RASQGISNYLA

SEQ ID NO: 18 - protein, 11 aa, synthetic construct
  REGION 1..11: note = Description of Artificial Sequence: Synthetic peptide
  REGION 1..11: note = CDRL1 Antibody ID 4G10
RASQGIRNDLG

SEQ ID NO: 19 - protein, 11 aa, synthetic construct
  REGION 1..11: note = Description of Artificial Sequence: Synthetic peptide
  REGION 1..11: note = CDRL2 Antibody ID 12G10
YKSDSDKQQGS

SEQ ID NO: 20 - protein, 7 aa, synthetic construct
  REGION 1..7: note = Description of Artificial Sequence: Synthetic peptide
  REGION 1..7: note = CDRL2 Antibody ID 26C10
QDSKRPS

SEQ ID NO: 21 - protein, 7 aa, synthetic construct
  REGION 1..7: note = Description of Artificial Sequence: Synthetic peptide
  REGION 1..7: note = CDRL2 Antibody ID 26C10
QDTKRPS

SEQ ID NO: 22 - protein, 7 aa, synthetic construct
  REGION 1..7: note = Description of Artificial Sequence: Synthetic peptide
  REGION 1..7: note = CDRL2 Antibody ID 24C12
WASTRES

SEQ ID NO: 23 - protein, 7 aa, synthetic construct
  REGION 1..7: note = Description of Artificial Sequence: Synthetic peptide
  REGION 1..7: note = CDRL2 Antibody ID 10E3
GASTRAT

SEQ ID NO: 24 - protein, 7 aa, synthetic construct
  REGION 1..7: note = Description of Artificial Sequence: Synthetic peptide
  REGION 1..7: note = CDRL2 Antibody ID 32E3
SASSRAT

SEQ ID NO: 25 - protein, 7 aa, synthetic construct
  REGION 1..7: note = Description of Artificial Sequence: Synthetic peptide
  REGION 1..7: note = CDRL2 Antibody ID 24F4
GASSRAT

SEQ ID NO: 26 - protein, 7 aa, synthetic construct
  REGION 1..7: note = Description of Artificial Sequence: Synthetic peptide
  REGION 1..7: note = CDRL2 Antibody ID 16B8
AASSLQT

SEQ ID NO: 27 - protein, 7 aa, synthetic construct
  REGION 1..7: note = Description of Artificial Sequence: Synthetic peptide
  REGION 1..7: note = CDRL2 Antibody ID 4C5
AASSLQV

SEQ ID NO: 28 - protein, 7 aa, synthetic construct
  REGION 1..7: note = Description of Artificial Sequence: Synthetic peptide
  REGION 1..7: note = CDRL2 Antibody ID 6E7
AASSLQN

SEQ ID NO: 29 - protein, 7 aa, synthetic construct
  REGION 1..7: note = Description of Artificial Sequence: Synthetic peptide
  REGION 1..7: note = CDRL2 Antibody ID 5E3
AASSLQS

SEQ ID NO: 30 - protein, 7 aa, synthetic construct
  REGION 1..7: note = Description of Artificial Sequence: Synthetic peptide
  REGION 1..7: note = CDRL2 Antibody ID 4G10
AASSLPS

SEQ ID NO: 31 - protein, 9 aa, synthetic construct
  REGION 1..9: note = Description of Artificial Sequence: Synthetic peptide
  REGION 1..9: note = CDRL3 Antibody ID 12G10
MIWYSSAVV

SEQ ID NO: 32 - protein, 9 aa, synthetic construct
  REGION 1..9: note = Description of Artificial Sequence: Synthetic peptide
  REGION 1..9: note = CDRL3 Antibody ID 26A10
QAWDSNTVV

SEQ ID NO: 33 - protein, 9 aa, synthetic construct
  REGION 1..9: note = Description of Artificial Sequence: Synthetic peptide
  REGION 1..9: note = CDRL3 Antibody ID 26C10
QAWDSSTVV

SEQ ID NO: 34 - protein, 9 aa, synthetic construct
  REGION 1..9: note = Description of Artificial Sequence: Synthetic peptide
  REGION 1..9: note = CDRL3 Antibody ID 24C12
QQYYITPIT

SEQ ID NO: 35 - protein, 9 aa, synthetic construct
  REGION 1..9: note = Description of Artificial Sequence: Synthetic peptide
  REGION 1..9: note = CDRL3 Antibody ID 24G6
QQYYSTPLT

SEQ ID NO: 36 - protein, 9 aa, synthetic construct
  REGION 1..9: note = Description of Artificial Sequence: Synthetic peptide
  REGION 1..9: note = CDRL3 Antibody 24A10
HQYYSTPCS

SEQ ID NO: 37 - protein, 9 aa, synthetic construct
  REGION 1..9: note = Description of Artificial Sequence: Synthetic peptide
  REGION 1..9: note = CDRL3 Antibody ID 10E3
LQDNNWPPT

SEQ ID NO: 38 - protein, 9 aa, synthetic construct
  REGION 1..9: note = Description of Artificial Sequence: Synthetic peptide
  REGION 1..9: note = CDRL3 Antibody ID 25F12
QQYNNWPRT

SEQ ID NO: 39 - protein, 9 aa, synthetic construct
  REGION 1..9: note = Description of Artificial Sequence: Synthetic peptide
  REGION 1..9: note = CDRL3 Antibody ID 32E3
QQFDSSPIT

SEQ ID NO: 40 - protein, 9 aa, synthetic construct
  REGION 1..9: note = Description of Artificial Sequence: Synthetic peptide
  REGION 1..9: note = CDRL3 Antibody ID 24F4
QQYDTSPFT

SEQ ID NO: 41 - protein, 9 aa, synthetic construct
  REGION 1..9: note = Description of Artificial Sequence: Synthetic peptide
  REGION 1..9: note = CDRL3 Antibody ID 16B8
QQSNSFPIT

SEQ ID NO: 42 - protein, 9 aa, synthetic construct
  REGION 1..9: note = Description of Artificial Sequence: Synthetic peptide
  REGION 1..9: note = CDRL3 Antibody ID 4C5
QQADSFPRN

SEQ ID NO: 43 - protein, 9 aa, synthetic construct
  REGION 1..9: note = Description of Artificial Sequence: Synthetic peptide
  REGION 1..9: note = CDRL3 Antibody ID 6E7
QQADSFPRT

SEQ ID NO: 44 - protein, 9 aa, synthetic construct
  REGION 1..9: note = Description of Artificial Sequence: Synthetic peptide
  REGION 1..9: note = CDRL3 Antibody ID 5E3
QQYSTYPFT

SEQ ID NO: 45 - protein, 9 aa, synthetic construct
  REGION 1..9: note = Description of Artificial Sequence: Synthetic peptide
  REGION 1..9: note = CDRL3 Antibody ID 4G10
LQHNSYPWT

SEQ ID NO: 46 - protein, 115 aa, synthetic construct
  REGION 1..115: note = Description of Artificial Sequence: Synthetic polypeptide
  REGION 1..115: note = VL Amino Acid Sequence Antibody ID 12G10
QAVPTQPSSLSASPGVLASLTCTLRSGINVGTYRIYWYQQKPGSPPQYLLRYKSDSDKQQGSGVPSRFSGSKDASANAGILLISGLQSEDEADYYCMIWYSSAVVFGGGTKLTVL

SEQ ID NO: 47 - protein, 106 aa, synthetic construct
  REGION 1..106: note = Description of Artificial Sequence: Synthetic polypeptide
  REGION 1..106: note = VL Amino Acid Sequence Antibody ID 26A10
SYELTQPPSVSVSPGQTASITCSGDKLGDKYVCWYQQKPGQSPVLVIYQDSKRPSGIPERFSGSNSGNTATLTISGTQAMDEADYYCQAWDSNTVVFGGGTKLTVL

SEQ ID NO: 48 - protein, 106 aa, synthetic construct
  REGION 1..106: note = Description of Artificial Sequence: Synthetic polypeptide
  REGION 1..106: note = VL Amino Acid Sequence Antibody ID 26C10
SFELTQPPSVSVSPGQTASITCSGDKLGDKYVCWYQQKPGQSPMLVIYQDTKRPSGIPERFSGSNSGNTATLTISGTQAMDEADYYCQAWDSSTVVFGGGTKLTVL

SEQ ID NO: 49 - protein, 106 aa, synthetic construct
  REGION 1..106: note = Description of Artificial Sequence: Synthetic polypeptide
  REGION 1..106: note = VL Amino Acid Sequence Antibody ID 26F2
SYELTQPPSVSVSPGQTASITCSGDKLGDKYVCWYQQKPGQSPVLVIFQDSKRPSGIPERFSGSNSGNTATLTISGTQAMDEADYYCQAWDSSTVVFGGGTKLTVL

SEQ ID NO: 50 - protein, 106 aa, synthetic construct
  REGION 1..106: note = Description of Artificial Sequence: Synthetic polypeptide
  REGION 1..106: note = VL Amino Acid Sequence Antibody ID 33B12
SYELTQPPSVSVSPGQTASITCSGDKLGDKYVCWYQQKPGQSPVLVIYQDSKRPSGIPERFSGSNSGNTATLTISGTQAMDEADYYCQAWDSSTVVFGGGTKLTVL

SEQ ID NO: 51 - protein, 113 aa, synthetic construct
  REGION 1..113: note = Description of Artificial Sequence: Synthetic polypeptide
  REGION 1..113: note = VL Amino Acid Sequence Antobody ID 24C12
GIVMTQSPDSLAVSLGERATINCKSSRSVLYSSNNKNYLAWYQQKPGQPPKVLIYWASTRESGVPDRFSGSGSGTDFTLTISSLQAEDVAVYNCQQYYITPITFGQGTRLEIK

SEQ ID NO: 52 - protein, 113 aa, synthetic construct
  REGION 1..113: note = Description of Artificial Sequence: Synthetic polypeptide
  REGION 1..113: note = VL Amino Acid Sequence Antibody ID 24G6
DIVMTQSPDSLAVSLGERATINCKSSQSVLYSSNNKHFLAWYQQKPGQPPKLLIYWASTRESGVPDRFSGSGSGTDFTLTISSLQAEDVAFYYCQQYYSTPLTFGGGTKVEIK

SEQ ID NO: 53 - protein, 113 aa, synthetic construct
  REGION 1..113: note = Description of Artificial Sequence: Synthetic polypeptide
  REGION 1..113: note = VL Amino Acid Sequence Antibody ID 24A10
DIVMTQSPDSLAVSLGERATITCKSSHNVLYSSNNKNYLAWYQQKPGQPPKLLIYWASTRESGVPDRFSGSGSGTDFTLTISSLQAEDVAVYYCHQYYSTPCSFGQGTKLEIK

SEQ ID NO: 54 - protein, 107 aa, synthetic construct
  REGION 1..107: note = Description of Artificial Sequence: Synthetic polypeptide
  REGION 1..107: note = VL Amino Acid Sequence Antibody ID 10E3
EIVMTQSPATLSVSPGERATLSCRASQSVSSNLAWFQQKPGQAPRLLIYGASTRATGIPARFSVSGSGTEFTLTISSLQSEDFAFYYCLQDNNWPPTFGPGTKVDIK

SEQ ID NO: 55 - protein, 107 aa, synthetic construct
  REGION 1..107: note = Description of Artificial Sequence: Synthetic polypeptide
  REGION 1..107: note = VL Amino Acid Sequence Antibody ID 13E7 14C12
EIVMTQSPATLSVSPGERATLSCRASQSVSSNLAWFQQKPGQAPRLLIYGASTRATGIPARFSVSGSGTEFTLTISSLQSEDFAVYYCLQDNNWPPTFGPGTKVDIK

SEQ ID NO: 56 - protein, 107 aa, synthetic construct
  REGION 1..107: note = Description of Artificial Sequence: Synthetic polypeptide
  REGION 1..107: note = VL Amino Acid Sequence Antibody ID 25F12
EKVMTQSPATLSVSPGERATLSCRASQSVNNNLAWYQQKPGQAPRLLIYGASTRATGIPARFSGSGSGTEFTLTISSLQSEDFAVYYCQQYNNWPRTFGQGTKVEIK

SEQ ID NO: 57 - protein, 108 aa, synthetic construct
  REGION 1..108: note = Description of Artificial Sequence: Synthetic polypeptide
  REGION 1..108: note = VL Amino Acid Sequence Antibody ID 25F12
EFVLTQSPGTLSLSPGERATLSCRASQIISSNYLAWYQQKPGQAPRLLIYSASSRATGIPDRFSGSGSGTDFTLTISRLEPEDFAVYYCQQFDSSPITFGRGTRLDIK

SEQ ID NO: 58 - protein, 108 aa, synthetic construct
  REGION 1..108: note = Description of Artificial Sequence: Synthetic polypeptide
  REGION 1..108: note = VL Amino Acid Sequence Antibody ID 24F4
EIVLTQSPGTLSLSPGERATLSCRASQSVSSSYLAWYQQKPGQAPRLLIYGASSRATGIPDRFSGSGSGTDFTLTISRLEPEDFALYYCQQYDTSPFTFGPGTKVDIK

SEQ ID NO: 59 - protein, 107 aa, synthetic construct
  REGION 1..107: note = Description of Artificial Sequence: Synthetic polypeptide
  REGION 1..107: note = VL Amino Acid Sequence Antibody ID 16B8
DIQMTQSPSSVSASVGDRVTVTCRASQDINSWLAWYQQKPGKAPKLLIYAASSLQTGVPSRFSGSGSGTDFTLTISSLQPEDFATYSCQQSNSFPITFGQGTRLEIK

SEQ ID NO: 60 - protein, 107 aa, synthetic construct
  REGION 1..107: note = Description of Artificial Sequence: Synthetic polypeptide
  REGION 1..107: note = VL Amino Acid Sequence Antibody ID 4C5
DIQMTQSPSSVSASVGDRVTITCRASQGISNWLAWYQQKPGKAPKLLIYAASSLQVGVPLRFSGSGSGTDFTLTISSLQPEDFATYYCQQADSFPRNFGQGTKLEIK

SEQ ID NO: 61 - protein, 107 aa, synthetic construct
  REGION 1..107: note = Description of Artificial Sequence: Synthetic polypeptide
  REGION 1..107: note = VL Amino Acid Sequence Antibody ID 6E7
DIQMTQSPSSVSASVGDRVTITCRASQGISSWLAWYQQKPGKAPKLLIYAASSLQNGVPSRFSGSGSGTDFTLTISSLQPEDFATYFCQQADSFPRTFGQGTKLEIK

SEQ ID NO: 62 - protein, 107 aa, synthetic construct
  REGION 1..107: note = Description of Artificial Sequence: Synthetic polypeptide
  REGION 1..107: note = VL Amino Acid Sequence Antibody ID 5E3
DIQMTQSPSSLSASVGDRVTITCRASQGISNYLAWFQQKPGKAPKSLIYAASSLQSGVPSKFSGSGSGTDFTLTISSLQPEDFATYYCQQYSTYPFTFGPGTKVDIK

SEQ ID NO: 63 - protein, 107 aa, synthetic construct
  REGION 1..107: note = Description of Artificial Sequence: Synthetic polypeptide
  REGION 1..107: note = Exemplary Anti-Human TREM2 Antibody Light Chain Variable Region Amino Acid Sequences - VL Amino Acid Sequence
DIQMTQSPSSLSASVGDRVTITCRASQGIRNDLGWYQQKPGNAPKRLIYAASSLPSGVPSRFSGSGSGPEFTLTISSLQPEDFATYYCLQHNSYPWTFGQGTKVEIT

SEQ ID NO: 64 - protein, 113 aa, Homo sapiens
DIVMTQSPDSLAVSLGERATINCKSSQSVLYSSNNKNYLAWYQQKPGQPPKLLIYWASTRESGVPDRFSGSGSGTDFTLTISSLQAEDVAVYYCQQYYSTPITFGQGTRLEIK

SEQ ID NO: 65 - protein, 113 aa, Homo sapiens; identical to SEQ ID NO: 64

SEQ ID NO: 66 - protein, 113 aa, Homo sapiens
DIVMTQSPDSLAVSLGERATINCKSSQSVLYSSNNKNYLAWYQQKPGQPPKLLIYWASTRESGVPDRFSGSGSGTDFTLTISSLQAEDVAVYYCQQYYSTPYTFGQGTKLEIK

SEQ ID NO: 67 - protein, 107 aa, Homo sapiens
EIVMTQSPATLSVSPGERATLSCRASQSVSSNLAWYQQKPGQAPRLLIYGASTRATGIPARFSGSGSGTEFTLTISSLQSEDFAVYYCQQYNNWPFTFGPGTKVDIK

SEQ ID NO: 68 - protein, 107 aa, Homo sapiens
EIVMTQSPATLSVSPGERATLSCRASQSVSSNLAWYQQKPGQAPRLLIYGASTRATGIPARFSGSGSGTEFTLTISSLQSEDFAVYYCQQYNNWPWTFGQGTKVEIK

SEQ ID NO: 69 - protein, 108 aa, Homo sapiens
EIVLTQSPGTLSLSPGERATLSCRASQSVSSSYLAWYQQKPGQAPRLLIYGASSRATGIPDRFSGSGSGTDFTLTISRLEPEDFAVYYCQQYGSSPITFGQGTRLEIK

SEQ ID NO: 70 - protein, 108 aa, Homo sapiens
EIVLTQSPGTLSLSPGERATLSCRASQSVSSSYLAWYQQKPGQAPRLLIYGASSRATGIPDRFSGSGSGTDFTLTISRLEPEDFAVYYCQQYGSSPFTFGPGTKVDIK

SEQ ID NO: 71 - protein, 107 aa, Homo sapiens
DIQMTQSPSSVSASVGDRVTITCRASQGISSWLAWYQQKPGKAPKLLIYAASSLQSGVPSRFSGSGSGTDFTLTISSLQPEDFATYYCQQANSFPITFGQGTRLEIK

SEQ ID NO: 72 - protein, 107 aa, Homo sapiens
DIQMTQSPSSVSASVGDRVTITCRASQGISSWLAWYQQKPGKAPKLLIYAASSLQSGVPSRFSGSGSGTDFTLTISSLQPEDFATYYCQQANSFPYTFGQGTKLEIK

SEQ ID NO: 73 - protein, 107 aa, Homo sapiens
DIQMTQSPSSLSASVGDRVTITCRASQGISNYLAWFQQKPGKAPKSLIYAASSLQSGVPSRFSGSGSGTDFTLTISSLQPEDFATYYCQQYNSYPFTFGPGTKVDIK

SEQ ID NO: 74 - protein, 107 aa, Homo sapiens
DIQMTQSPSSLSASVGDRVTITCRASQGIRNDLGWYQQKPGKAPKRLIYAASSLQSGVPSRFSGSGSGTEFTLTISSLQPEDFATYYCLQHNSYPWTFGQGTKVEIK

SEQ ID NO: 75 - protein, 116 aa, Homo sapiens
QAVLTQPASLSASPGASASLTCTLRSGINVGTYRIYWYQQKPGSPPQYLLRYKSDSDKQQGSGVPSRFSGSKDASANAGILLISGLQSEDEADYYCMIWHSSASVVFGGGTKLTVL

SEQ ID NO: 76 - protein, 107 aa, Homo sapiens
SYELTQPPSVSVSPGQTASITCSGDKLGDKYACWYQQKPGQSPVLVIYQDSKRPSGIPERFSGSNSGNTATLTISGTQAMDEADYYCQAWDSSTAVVFGGGTKLTVL

SEQ ID NO: 77 - protein, 5 aa, synthetic construct
  REGION 1..5: note = Description of Artificial Sequence: Synthetic peptide
  REGION 1..5: note = Exemplary Anti-Human TREM2 Antibody Heavy Chain Variable Region Amino Acid Sequences - CDRH1
SYAMS

SEQ ID NO: 78 - protein, 5 aa, synthetic construct
  REGION 1..5: note = Description of Artificial Sequence: Synthetic peptide
  REGION 1..5: note = CDRH1 Antibody ID 26A10
SFGMS

SEQ ID NO: 79 - protein, 5 aa, synthetic construct
  REGION 1..5: note = Description of Artificial Sequence: Synthetic peptide
  REGION 1..5: note = CDRH1 Antibody ID 24A10
NYAMS

SEQ ID NO: 80 - protein, 5 aa, synthetic construct
  REGION 1..5: note = Description of Artificial Sequence: Synthetic peptide
  REGION 1..5: note = CDRH1 Antibody ID 10E3
NYWIG

SEQ ID NO: 81 - protein, 5 aa, synthetic construct
  REGION 1..5: note = Description of Artificial Sequence: Synthetic peptide
  REGION 1..5: note = CDRH1 Antibody ID 13E7 14C12
SYWIG

SEQ ID NO: 82 - protein, 5 aa, synthetic construct
  REGION 1..5: note = Description of Artificial Sequence: Synthetic peptide
  REGION 1..5: note = CDRH1 Antibody ID 25F12
SYYWS

SEQ ID NO: 83 - protein, 5 aa, synthetic construct
  REGION 1..5: note = Description of Artificial Sequence: Synthetic peptide
  REGION 1..5: note = CDRH1 Antibody 16B8
NYGIS

SEQ ID NO: 84 - protein, 5 aa, synthetic construct
  REGION 1..5: note = Description of Artificial Sequence: Synthetic peptide
  REGION 1..5: note = CDRH1 Antibody ID 4C5
NYWIA

SEQ ID NO: 85 - protein, 5 aa, synthetic construct
  REGION 1..5: note = Description of Artificial Sequence: Synthetic peptide
  REGION 1..5: note = CDRH1 Antibody ID 6E7
SYWIA

SEQ ID NO: 86 - protein, 5 aa, synthetic construct
  REGION 1..5: note = Description of Artificial Sequence: Synthetic peptide
  REGION 1..5: note = CDRH1 Antibody ID 5E3
GYYIH

SEQ ID NO: 87 - protein, 17 aa, synthetic construct
  REGION 1..17: note = Description of Artificial Sequence: Synthetic peptide
  REGION 1..17: note = CDRH2 Antibody ID 12G10 24C12
AIGGGGVSTYCADSVKG

SEQ ID NO: 88 - protein, 17 aa, synthetic construct
  REGION 1..17: note = Description of Artificial Sequence: Synthetic peptide
  REGION 1..17: note = Exemplary Anti-Human TREM2 Antibody Heavy Chain Variable Region Amino Acid Sequences - CDRH2
YISSSSFTIYYADSVKG

SEQ ID NO: 89 - protein, 17 aa, synthetic construct
  REGION 1..17: note = Description of Artificial Sequence: Synthetic peptide
  REGION 1..17: note = CDRH2 Antibidy 26A10
YISKSSFTIYYADSVKG

SEQ ID NO: 90 - protein, 17 aa, synthetic construct
  REGION 1..17: note = Description of Artificial Sequence: Synthetic peptide
  REGION 1..17: note = CDRH2 Antibody ID24G6
AISGSGGSTYYADSVKG

SEQ ID NO: 91 - protein, 17 aa, synthetic construct
  REGION 1..17: note = Description of Artificial Sequence: Synthetic peptide
  REGION 1..17: note = CDRH2 Antibody ID 10E3
IIYPGDSDTRYSPSFQG

SEQ ID NO: 92 - protein, 16 aa, synthetic construct
  REGION 1..16: note = Description of Artificial Sequence: Synthetic peptide
  REGION 1..16: note = CDRH2 Antibody ID 25F12
EINHSGNTNYNPSLKS

SEQ ID NO: 93 - protein, 17 aa, synthetic construct
  REGION 1..17: note = Description of Artificial Sequence: Synthetic peptide
  REGION 1..17: note = CDRH2 Antibody ID 16B8
WISAYNGNTNYAQKLQG

SEQ ID NO: 94 - protein, 17 aa, synthetic construct
  REGION 1..17: note = Description of Artificial Sequence: Synthetic peptide
  REGION 1..17: note = CDRH2 Antibody 4C5
WINPYSGGTTSAQKFQG

SEQ ID NO: 95 - protein, 12 aa, synthetic construct
  REGION 1..12: note = Description of Artificial Sequence: Synthetic peptide
  REGION 1..12: note = CDRH3 Antibody 12G10 24C12
FYIAVAGSHFDY

SEQ ID NO: 96 - protein, 17 aa, synthetic construct
  REGION 1..17: note = Description of Artificial Sequence: Synthetic peptide
  REGION 1..17: note = CDRH3 Antibody ID 26A10
EGGLTMVRGVSSYGLDV

SEQ ID NO: 97 - protein, 17 aa, synthetic construct
  REGION 1..17: note = Description of Artificial Sequence: Synthetic peptide
  REGION 1..17: note = CDRH3 Antibody ID 26C10
EGGITMVRGVSSYGMDV

SEQ ID NO: 98 - protein, 10 aa, synthetic construct
  REGION 1..10: note = Description of Artificial Sequence: Synthetic peptide
  REGION 1..10: note = CDRH3 Antibody ID 24G6
AYTPMAFFDY

SEQ ID NO: 99 - protein, 7 aa, synthetic construct
  REGION 1..7: note = Description of Artificial Sequence: Synthetic peptide
  REGION 1..7: note = CDRH3 Antibody ID 24A10
GGWELFY

SEQ ID NO: 100 - protein, 12 aa, synthetic construct
  REGION 1..12: note = Description of Artificial Sequence: Synthetic peptide
  REGION 1..12: note = CDRH3 Antibody ID 10E3
RRQGIWGDALDI

SEQ ID NO: 101 - protein, 12 aa, synthetic construct
  REGION 1..12: note = Description of Artificial Sequence: Synthetic peptide
  REGION 1..12: note = CDRH3 Antibody ID 13E7 14C12
RRQGIWGDALDF

SEQ ID NO: 102 - protein, 16 aa, synthetic construct
  REGION 1..16: note = Description of Artificial Sequence: Synthetic peptide
  REGION 1..16: note = CDRH3 Antibody ID 25F12
EGYYDILTGYHDAFDI

SEQ ID NO: 103 - protein, 13 aa, synthetic construct
  REGION 1..13: note = Description of Artificial Sequence: Synthetic peptide
  REGION 1..13: note = CDRH3 Antibody ID 32E3
HDIIPAAPGAFDI

SEQ ID NO: 104 - protein, 13 aa, synthetic construct
  REGION 1..13: note = Description of Artificial Sequence: Synthetic peptide
  REGION 1..13: note = CDRH3 Antibody ID 24F4
QAIAVTGLGGFDP

SEQ ID NO: 105 - protein, 10 aa, synthetic construct
  REGION 1..10: note = Description of Artificial Sequence: Synthetic peptide
  REGION 1..10: note = CDRH3 Antibody ID 16B8
RGYSYGSFDY

SEQ ID NO: 106 - protein, 14 aa, synthetic construct
  REGION 1..14: note = Description of Artificial Sequence: Synthetic peptide
  REGION 1..14: note = CDRH3 Antibody ID 4C5
QRTFYYDSSGYFDY

SEQ ID NO: 107 - protein, 14 aa, synthetic construct
  REGION 1..14: note = Description of Artificial Sequence: Synthetic peptide
  REGION 1..14: note = CDRH3 Antibody ID 6E7
QRTFYYDSSDYFDY

SEQ ID NO: 108 - protein, 12 aa, synthetic construct
  REGION 1..12: note = Description of Artificial Sequence: Synthetic peptide
  REGION 1..12: note = CDRH3 Antibody ID 5E3
DGGYLALYGTDV

SEQ ID NO: 109 - protein, 13 aa, synthetic construct
  REGION 1..13: note = Description of Artificial Sequence: Synthetic peptide
  REGION 1..13: note = CDRH3 Antibody ID 4G10
QGIEVTGTGGLDV

SEQ ID NO: 110 - protein, 121 aa, synthetic construct
  REGION 1..121: note = Description of Artificial Sequence: Synthetic polypeptide
  REGION 1..121: note = VH Amino Acid Sequence Antibody ID 12G10 24C12
EVQLLESGGGLVQPGGSLRLSCAASGFTFSSYAMSWVRQAPGKGLEWVSAIGGGGVSTYCADSVKGRFTISRDNSKNTLYLQMNSLRAEDTAVYYCAKFYIAVAGSHFDYWGQGTLVTVSS

SEQ ID NO: 111 - protein, 126 aa, synthetic construct
  REGION 1..126: note = Description of Artificial Sequence: Synthetic polypeptide
  REGION 1..126: note = VH Amino Acid Sequence Antibody ID 26A10
EVQLVESGGALVQRGGSLRLSCAASRFTFSSFGMSWVRQAPGKGLEWVSYISSSSFTIYYADSVKGRFTISRDNAKNSFYLQMNSLRDEDTAVYYCAREGGLTMVRGVSSYGLDVWGQGTTVTVSS

SEQ ID NO: 112 - protein, 126 aa, synthetic construct
  REGION 1..126: note = Description of Artificial Sequence: Synthetic polypeptide
  REGION 1..126: note = VH Amino Acid Sequence Antibody ID 26C10
EVQLVESGGALVQPGGSLRLSCAASGFTFSSFGMSWVRQAPGKGLEWVSYISSSSFTIYYADSVKGRFTISRDNAKNSFYLQMNSLRDEDTAVYFCVREGGITMVRGVSSYGMDVWGQGTTVTVSS

SEQ ID NO: 113 - protein, 126 aa, synthetic construct
  REGION 1..126: note = Description of Artificial Sequence: Synthetic polypeptide
  REGION 1..126: note = VH Amino Acid Sequence Antibody ID 26F2
EVQLVESGGALVQPGGSLRLSCAASGFTFSSFGMSWVRQAPGKGLEWISYISSSSFTIYYADSVKGRFTISRDNAKNSFYLQMNSLRDEDTAVYFCAREGGITMVRGVSSYGMDVWGQGTTVTVSS

SEQ ID NO: 114 - protein, 126 aa, synthetic construct
  REGION 1..126: note = Description of Artificial Sequence: Synthetic polypeptide
  REGION 1..126: note = VH Amino Acid Sequence Antibody ID 33B12
EVQLVESGGALVQPGGSLRLSCAASGFTFSSFGMSWVRQAPGKGLEWVSYISKSSFTIYYADSVKGRFTISRDNAKNSFYLQMNSLRDEDTAVYYCAREGGLTMVRGVSSYGLDVWGQGTTVTVSS

SEQ ID NO: 115 - protein, 119 aa, synthetic construct
  REGION 1..119: note = Description of Artificial Sequence: Synthetic polypeptide
  REGION 1..119: note = VH Amino Acid Sequence Antibody ID 24G6
EVQLLESGGGLVQPGGSLRLSCAASGFTFSSYAMSWVRQAPGKGLEWVSAISGSGGSTYYADSVKGRFTISRDNSKNTLYLQMNSLRAEDTAVYYCAKAYTPMAFFDYWGQGTLVTVSS

SEQ ID NO: 116 - protein, 116 aa, synthetic construct
  REGION 1..116: note = Description of Artificial Sequence: Synthetic polypeptide
  REGION 1..116: note = VH Amino Acid Sequence Antibody ID 24A10
EVQVLESGGGLVQPGGSLRLSCAASGFTFSNYAMSWVRQAPGKGLEWVSAISGSGGSTYYADSVKGRFTISRDNSKNTLYLQMNSLRAEDTAVYYCAKGGWELFYWGQGTLVTVSS

SEQ ID NO: 117 - protein, 121 aa, synthetic construct
  REGION 1..121: note = Description of Artificial Sequence: Synthetic polypeptide
  REGION 1..121: note = VH Amino Acid Sequence Antibody ID 10E3
EVQLVQSGAEVKKPGESLMISCKGSGYSFTNYWIGWVRQMPGKGLEWMGIIYPGDSDTRYSPSFQGQVTISADKSISTAYLQWSSLKASDTAMYFCARRRQGIWGDALDIWGQGTLVTVSS

SEQ ID NO: 118 - protein, 121 aa, synthetic construct
  REGION 1..121: note = Description of Artificial Sequence: Synthetic polypeptide
  REGION 1..121: note = VH Amino Acid Sequence Antibody ID 13E7 14C12
EVQLVQSGAEVKKPGESLMISCKGSGYSFTSYWIGWVRQMPGKGLEWMGIIYPGDSDTRYSPSFQGQVTISADKSISTAYLQWSSLKASDTAMYFCARRRQGIWGDALDFWGQGTLVTVSS

SEQ ID NO: 119 - protein, 124 aa, synthetic construct
  REGION 1..124: note = Description of Artificial Sequence: Synthetic polypeptide
  REGION 1..124: note = VH Amino Acid Sequence Antibody ID 25F12
QVQLQQWGAGLLKPSETLSLTCAVYGGSFSSYYWSWIRQPPGKGLEWIGEINHSGNTNYNPSLKSRVTISVDTSKNQFSLKLSSVTAADTAVYYCAREGYYDILTGYHDAFDIWDQGTMVTVFS

SEQ ID NO: 120 - protein, 122 aa, synthetic construct
  REGION 1..122: note = Description of Artificial Sequence: Synthetic polypeptide
  REGION 1..122: note = VH Amino Acid Sequence Antibody ID 32E3
EVQLVQSGAEVKKPGESLKISCKGSGYSFTSYWIGWVRQMPGKGLEWMGIIYPGDSDTRYSPSFQGQVTISADKSISTAYLQWSTLKASDTAIYYCARHDIIPAAPGAFDIWGQGTMVTVSS

SEQ ID NO: 121 - protein, 122 aa, synthetic construct
  REGION 1..122: note = Description of Artificial Sequence: Synthetic polypeptide
  REGION 1..122: note = VH Amino Acid Sequence Antibody ID 24F4
EVQLVQSGAEVKKPGESLKISCKGSGYTFTSYWIGWVRQMPGKGLEWMGIIYPGDSDTRYSPSFQGQVTISVDKSSSTAYLQWSSLKASDTAIYYCTRQAIAVTGLGGFDPWGQGTLVTVSS

SEQ ID NO: 122 - protein, 119 aa, synthetic construct
  REGION 1..119: note = Description of Artificial Sequence: Synthetic polypeptide
  REGION 1..119: note = VH Amino Acid Sequence Antibody ID 16B8
QVQLVQSGAEVKKPGASVKVSCKASGYTFTNYGISWVRQAPGQGLEWMGWISAYNGNTNYAQKLQGRVTMTTDTSTSTVYMELRSLRSDDTAVYYCARRGYSYGSFDYWGQGTLVTVSS

SEQ ID NO: 123 - protein, 123 aa, synthetic construct
  REGION 1..123: note = Description of Artificial Sequence: Synthetic polypeptide
  REGION 1..123: note = VH Amino Acid Sequence Antibody ID 4C5
EVQLVQSGAEVKKPGESLKISCKGSGHSFTNYWIAWVRQMPGKGLEWMGIIYPGDSDTRYSPSFQGQVTISADKSISTAYLQWSSLKASDTAVYFCARQRTFYYDSSGYFDYWGQGTLVTVSS

SEQ ID NO: 124 - protein, 123 aa, synthetic construct
  REGION 1..123: note = Description of Artificial Sequence: Synthetic polypeptide
  REGION 1..123: note = VH Amino Acid Sequence Antibody ID 6E7
EVQLVQSGAEVKKPGESLKISCKGSGYSFTSYWIAWVRQMPGKGLEWMGIIYPGDSDTRYSPSFQGQVTISADKSISTAYLQWSSLKASDTAMYFCARQRTFYYDSSDYFDYWGQGTLVTVSS

SEQ ID NO: 125 - protein, 121 aa, synthetic construct
  REGION 1..121: note = Description of Artificial Sequence: Synthetic polypeptide
  REGION 1..121: note = VH Amino Acid Sequence Antibody ID 5E3
QVQLVQSGAEVKKPGASVKVSCKASGYTFTGYYIHWVRQAPGLGLEWMGWINPYSGGTTSAQKFQGRVTMTRDTSISSAYMELSRLRSDDTAVYYCARDGGYLALYGTDVWGQGTTVTVSS

SEQ ID NO: 126 - protein, 122 aa, synthetic construct
  REGION 1..122: note = Description of Artificial Sequence: Synthetic polypeptide
  REGION 1..122: note = VH Amino Acid Sequence Antibody ID 4G10
EVQLVQSGAEVKKPGESLKISCKGSGYSFPSYWIAWVRQMPGKGLEWMGIIYPGDSDTRYSPSFQGQVTISADKSISTAFLKWSSLKASDTAMYFCARQGIEVTGTGGLDVWGQGTTVTVSS

SEQ ID NO: 127 - protein, 125 aa, Homo sapiens
EVQLLESGGGLVQPGGSLRLSCAASGFTFSSYAMSWVRQAPGKGLEWVSAISGSGGSTYYADSVKGRFTISRDNSKNTLYLQMNSLRAEDTAVYYCAKYYDYVWGSYRYTYFDYWGQGTLVTVSS

SEQ ID NO: 128 - protein, 121 aa, Homo sapiens
EVQLVESGGGLVQPGGSLRLSCAASGFTFSSYSMNWVRQAPGKGLEWVSYISSSSSTIYYADSVKGRFTISRDNAKNSLYLQMNSLRDEDTAVYYCARLTGYYYYYGMDVWGQGTTVTVSS

SEQ ID NO: 129 - protein, 122 aa, Homo sapiens
EVQLLESGGGLVQPGGSLRLSCAASGFTFSSYAMSWVRQAPGKGLEWVSAISGSGGSTYYADSVKGRFTISRDNSKNTLYLQMNSLRAEDTAVYYCAKAYCGGDCYSYFDYWGQGTLVTVSS

SEQ ID NO: 130 - protein, 120 aa, Homo sapiens
EVQLLESGGGLVQPGGSLRLSCAASGFTFSSYAMSWVRQAPGKGLEWVSAISGSGGSTYYADSVKGRFTISRDNSKNTLYLQMNSLRAEDTAVYYCAKGTTGTAEYFQHWGQGTLVTVSS

SEQ ID NO: 131 - protein, 118 aa, Homo sapiens
EVQLVQSGAEVKKPGESLKISCKGSGYSFTSYWIGWVRQMPGKGLEWMGIIYPGDSDTRYSPSFQGQVTISADKSISTAYLQWSSLKASDTAMYYCARGTTGTYFDYWGQGTLVTVSS

SEQ ID NO: 132 - protein, 118 aa, Homo sapiens
QVQLQQWGAGLLKPSETLSLTCAVYGGSFSGYYWSWIRQPPGKGLEWIGEINHSGSTNYNPSLKSRVTISVDTSKNQFSLKLSSVTAADTAVYYCARYNWNDDAFDIWGQGTMVTVSS

SEQ ID NO: 133 - protein, 121 aa, Homo sapiens
EVQLVQSGAEVKKPGESLKISCKGSGYSFTSYWIGWVRQMPGKGLEWMGIIYPGDSDTRYSPSFQGQVTISADKSISTAYLQWSSLKASDTAMYYCARVDIVATIDAFDIWGQGTMVTVSS

SEQ ID NO: 134 - protein, 121 aa, Homo sapiens
EVQLVQSGAEVKKPGESLKISCKGSGYSFTSYWIGWVRQMPGKGLEWMGIIYPGDSDTRYSPSFQGQVTISADKSISTAYLQWSSLKASDTAMYYCARVDIVATINWFDPWGQGTLVTVSS

SEQ ID NO: 135 - protein, 119 aa, Homo sapiens
QVQLVQSGAEVKKPGASVKVSCKASGYTFTSYGISWVRQAPGQGLEWMGWISAYNGNTNYAQKLQGRVTMTTDTSTSTAYMELRSLRSDDTAVYYCARYSGSYYYFDYWGQGTLVTVSS

SEQ ID NO: 136 - protein, 119 aa, Homo sapiens
EVQLVQSGAEVKKPGESLKISCKGSGYSFTSYWIGWVRQMPGKGLEWMGIIYPGDSDTRYSPSFQGQVTISADKSISTAYLQWSSLKASDTAMYYCARYSGSYYYFDYWGQGTLVTVSS

SEQ ID NO: 137 - protein, 123 aa, Homo sapiens
QVQLVQSGAEVKKPGASVKVSCKASGYTFTGYYMHWVRQAPGQGLEWMGWINPNSGGTNYAQKFQGRVTMTRDTSISTAYMELSRLRSDDTAVYYCARDYGDYYYYYYGMDVWGQGTTVTVSS

SEQ ID NO: 138 - protein, 125 aa, Homo sapiens
EVQLVQSGAEVKKPGESLKISCKGSGYSFTSYWIGWVRQMPGKGLEWMGIIYPGDSDTRYSPSFQGQVTISADKSISTAYLQWSSLKASDTAMYYCARVDIVATIYYYYYGMDVWGQGTTVTVSS

SEQ ID NO: 139 - protein, 7 aa, synthetic construct
  REGION 1..7: note = Description of Artificial Sequence: Synthetic peptide
  REGION 1..7: note = CDRL2 Consensus for 6E7 improved Affinity variants
  MOD_RES 1: note = A or G
  MOD_RES 5: note = L or R
  MOD_RES 7: note = N, K, R, L, or T
XASSXQX

SEQ ID NO: 140 - protein, 9 aa, synthetic construct
  REGION 1..9: note = Description of Artificial Sequence: Synthetic peptide
  REGION 1..9: note = CDRL3 Consensus for 6E7 improved Affinity variants
  MOD_RES 1: note = Q or G
  MOD_RES 5: note = S or R
  MOD_RES 6: note = F, L or Y
  MOD_RES 8: note = R or H
XQADXXPXT

SEQ ID NO: 141 - protein, 17 aa, synthetic construct
  REGION 1..17: note = Description of Artificial Sequence: Synthetic peptide
  REGION 1..17: note = CDRH2 Consensus for 6E7 improved Affinity variants
  MOD_RES 1: note = I or T
  MOD_RES 9: note = T or V
  MOD_RES 11: note = Y or L
  MOD_RES 12: note = S or A
  MOD_RES 14: note = S, G, or E
  MOD_RES 17: note = G or D
XIYPGDSDXRXXPXFQX

SEQ ID NO: 142 - protein, 14 aa, synthetic construct
  REGION 1..14: note = Description of Artificial Sequence: Synthetic peptide
  REGION 1..14: note = CDRH3 Consensus for 6E7 improved Affinity variants
  MOD_RES 1: note = Q, G, S, or M
  MOD_RES 12: note = F or S
XRTFYYDSSDYXDY

SEQ ID NO: 143 - protein, 7 aa, synthetic construct
  REGION 1..7: note = Description of Artificial Sequence: Synthetic peptide
  REGION 1..7: note = CDRL2 Antibody ID V3
AASSRQN

SEQ ID NO: 144 - protein, 7 aa, synthetic construct
  REGION 1..7: note = Description of Artificial Sequence: Synthetic peptide
  REGION 1..7: note = CDRL2 Antibody ID V24 C01
AASSLQK

SEQ ID NO: 145 - protein, 7 aa, synthetic construct
  REGION 1..7: note = Description of Artificial Sequence: Synthetic peptide
  REGION 1..7: note = CDRL2 Antibody ID V27 C04
AASSLQR

SEQ ID NO: 146 - protein, 7 aa, synthetic construct
  REGION 1..7: note = Description of Artificial Sequence: Synthetic peptide
  REGION 1..7: note = CDRL2 Anitbody ID V40 D05
AASSLQL

SEQ ID NO: 147 - protein, 7 aa, synthetic construct
  REGION 1..7: note = Description of Artificial Sequence: Synthetic peptide
  REGION 1..7: note = CDRL2 Antibody ID V84 H01
GASSLQN

SEQ ID NO: 148 - protein, 9 aa, synthetic construct
  REGION 1..9: note = Description of Artificial Sequence: Synthetic peptide
  REGION 1..9: note = CDRL3 Antibody ID V40 D05
QQADRFPRT

SEQ ID NO: 149 - protein, 9 aa, synthetic construct
  REGION 1..9: note = Description of Artificial Sequence: Synthetic peptide
  REGION 1..9: note = CDRL3 Antibody ID V24 C01
QQADSFPHT

SEQ ID NO: 150 - protein, 9 aa, synthetic construct
  REGION 1..9: note = Description of Artificial Sequence: Synthetic peptide
  REGION 1..9: note = CDRL3 Antibody ID V48 E01
QQADSLPRT

SEQ ID NO: 151 - protein, 9 aa, synthetic construct
  REGION 1..9: note = Description of Artificial Sequence: Synthetic peptide
  REGION 1..9: note = CDRL3 Antibody ID V49 E02 V73 G02
QQADSYPRT

SEQ ID NO: 152 - protein, 9 aa, synthetic construct
  REGION 1..9: note = Description of Artificial Sequence: Synthetic peptide
  REGION 1..9: note = CDRL3 Antibody ID V60 F01
GQADSFPRT

SEQ ID NO: 153 - protein, 107 aa, synthetic construct
  REGION 1..107: note = Description of Artificial Sequence: Synthetic polypeptide
  REGION 1..107: note = VL Amino Acid Sequence Antibody ID V3
DIQMTQSPSSVSASVGDRVTITCRASQGISSWLAWYQQKPGKAPKLLIYAASSRQNGVPSRFSGSGSGTDFTLTISSLQPEDFATYFCQQADRFPRTFGQGTKLEIK

SEQ ID NO: 154 - protein, 107 aa, synthetic construct
  REGION 1..107: note = Description of Artificial Sequence: Synthetic polypeptide
  REGION 1..107: note = VL Amino Acid Sequence Antibody ID V24 C01
DIQMTQSPSSVSASVGDRVTITCRASQGISSWLAWYQQKPGKAPKLLIYAASSLQKGVPSRFSGSGSGTDFTLTISSLQPEDFATYFCQQADSFPHTFGQGTKLEIK

SEQ ID NO: 155 - protein, 107 aa, synthetic construct
  REGION 1..107: note = Description of Artificial Sequence: Synthetic polypeptide
  REGION 1..107: note = VL Amino Acid Sequence Antibody ID V27 C04
DIQMTQSPSSVSASVGDRVTITCRASQGISSWLAWYQQKPGKAPKLLIYAASSLQRGVPSRFSGSGSGTDFTLTISSLQPEDFATYFCQQADSFPRTFGQGTKLEIK

SEQ ID NO: 156 - protein, 107 aa, synthetic construct
  REGION 1..107: note = Description of Artificial Sequence: Synthetic polypeptide
  REGION 1..107: note = VL Amino Acid Sequence Antibody ID V40 D05
DIQMTQSPSSVSASVGDRVTITCRASQGISSWLAWYQQKPGKAPKLLIYAASSLQLGVPSRFSGSGSGTDFTLTISSLQPEDFATYFCQQADRFPRTFGQGTKLEIK

SEQ ID NO: 157 - protein, 107 aa, synthetic construct
  REGION 1..107: note = Description of Artificial Sequence: Synthetic polypeptide
  REGION 1..107: note = VL Amino Acid Sequence Antibody ID V48 E01
DIQMTQSPSSVSASVGDRVTITCRASQGISSWLAWYQQKPGKAPKLLIYAASSLQTGVPSRFSGSGSGTDFTLTISSLQPEDFATYFCQQADSLPRTFGQGTKLEIK

SEQ ID NO: 158 - protein, 107 aa, synthetic construct
  REGION 1..107: note = Description of Artificial Sequence: Synthetic polypeptide
  REGION 1..107: note = VL Amino Acid Sequence Antibody ID V49 E02 V73 G02
DIQMTQSPSSVSASVGDRVTITCRASQGISSWLAWYQQKPGKAPKLLIYAASSRQNGVPSRFSGSGSGTDFTLTISSLQPEDFATYFCQQADSYPRTFGQGTKLEIK

SEQ ID NO: 159 - protein, 107 aa, synthetic construct
  REGION 1..107: note = Description of Artificial Sequence: Synthetic polypeptide
  REGION 1..107: note = VL Amino Acid Sequence Antibody ID V52 E05
DIQMTQSPSSVSASVGDRVTITCRASQGISSWLAWYQQKPGKAPKLLIYAASSLQRGVPSRFSGSGSGTDFTLTISSLQPEDFATYFCQQADRFPRTFGQGTKLEIK

SEQ ID NO: 160 - protein, 107 aa, synthetic construct
  REGION 1..107: note = Description of Artificial Sequence: Synthetic polypeptide
  REGION 1..107: note = VL Amino Acid Sequence Antibody ID V60 F01
DIQMTQSPSSVSASVGDRVTITCRASQGISSWLAWYQQKPGKAPKLLIYAASSLQRGVPSRFSGSGSGTDFTLTISSLQPEDFATYFCGQADSFPRTFGQGTKLEIK

SEQ ID NO: 161 - protein, 107 aa, synthetic construct
  REGION 1..107: note = Description of Artificial Sequence: Synthetic polypeptide
  REGION 1..107: note = VL Amino Acid Sequence Antibody ID V76 G05
DIQMTQSPSSVSASVGDRVTITCRASQGISSWLAWYQQKPGKAPKLLIYAASSLQKGVPSRFSGSGSGRDFTLTISSLQPEDFATYFCQQADSFPRTFGQGTKLEIK

SEQ ID NO: 162 - protein, 107 aa, synthetic construct
  REGION 1..107: note = Description of Artificial Sequence: Synthetic polypeptide
  REGION 1..107: note = VL Amino Acid Sequence Antibody ID V84 H01
DIQMTQSPSSVSASVGDRVTITCRASQGISSWLAWYQQKPGKAPKLLIYGASSLQNGVPSRFSGSGSGTDFTLTISSLQPEDFATYFCQQADSFPRTFGQGTKLEIK

SEQ ID NO: 163 - protein, 4 aa, synthetic construct
  REGION 1..4: note = Description of Artificial Sequence: Synthetic peptide
  REGION 1..4: note = FR1/CDRH1 border Antibody ID 6E7
YSFT

SEQ ID NO: 164 - protein, 4 aa, synthetic construct
  REGION 1..4: note = Description of Artificial Sequence: Synthetic peptide
  REGION 1..4: note = Heavy Chain Variable Region Amino Acid Sequences for Reduced Affinity TREM2 Antibodies - FR1/CDRH1 border
YSFA

SEQ ID NO: 165 - protein, 4 aa, synthetic construct
  REGION 1..4: note = Description of Artificial Sequence: Synthetic peptide
  REGION 1..4: note = FR1/CDRH1 border Antibody ID V3 A04
YSFG

SEQ ID NO: 166 - protein, 4 aa, synthetic construct
  REGION 1..4: note = Description of Artificial Sequence: Synthetic peptide
  REGION 1..4: note = FR1/CDRH1 border Antibody ID V49 E02
YSFN

SEQ ID NO: 167 - protein, 4 aa, synthetic construct
  REGION 1..4: note = Description of Artificial Sequence: Synthetic peptide
  REGION 1..4: note = FR1/CDRH1 border Antibody ID V52 E05
YSFE

SEQ ID NO: 168 - protein, 4 aa, synthetic construct
  REGION 1..4: note = Description of Artificial Sequence: Synthetic peptide
  REGION 1..4: note = FR1/CDRH1 border Antibody ID V60 F01
YHFT

SEQ ID NO: 169 - protein, 4 aa, synthetic construct
  REGION 1..4: note = Description of Artificial Sequence: Synthetic peptide
  REGION 1..4: note = FR1/CDRH1 border Antibody ID V76 G05 V84 H01
YGFT

SEQ ID NO: 170 - protein, 17 aa, synthetic construct
  REGION 1..17: note = Description of Artificial Sequence: Synthetic peptide
  REGION 1..17: note = CDRH2 Antibody ID 6E7 V3 A04
IIYPGDSDTRYSPSFQD

SEQ ID NO: 171 - protein, 17 aa, synthetic construct
  REGION 1..17: note = Description of Artificial Sequence: Synthetic peptide
  REGION 1..17: note = CDRH2 Antibody ID V24 C01
IIYPGDSDVRYSPSFQG

SEQ ID NO: 172 - protein, 17 aa, synthetic construct
  REGION 1..17: note = Description of Artificial Sequence: Synthetic peptide
  REGION 1..17: note = CDRH2 Antibody ID V27 C04
IIYPGDSDTRYAPSFQG

SEQ ID NO: 173 - protein, 17 aa, synthetic construct
  REGION 1..17: note = Description of Artificial Sequence: Synthetic peptide
  REGION 1..17: note = CDRH2 Antibody ID V49 E02
TIYPGDSDTRLSPSFQG

SEQ ID NO: 174 - protein, 17 aa, synthetic construct
  REGION 1..17: note = Description of Artificial Sequence: Synthetic peptide
  REGION 1..17: note = CDRH2 Antibody ID V73 G02
IIYPGDSDTRYSPGFQG

SEQ ID NO: 175 - protein, 17 aa, synthetic construct
  REGION 1..17: note = Description of Artificial Sequence: Synthetic peptide
  REGION 1..17: note = CDRH2 Antibody ID V76 G05
IIYPGDSDTRYSPEFQG

SEQ ID NO: 176 - protein, 14 aa, synthetic construct
  REGION 1..14: note = Description of Artificial Sequence: Synthetic peptide
  REGION 1..14: note = CDRH3 Antibody ID V3 A04
GRTFYYDSSDYFDY

SEQ ID NO: 177 - protein, 14 aa, synthetic construct
  REGION 1..14: note = Description of Artificial Sequence: Synthetic peptide
  REGION 1..14: note = CDRH3 Antibody ID V24 C01
SRTFYYDSSDYFDY

SEQ ID NO: 178 - protein, 14 aa, synthetic construct
  REGION 1..14: note = Description of Artificial Sequence: Synthetic peptide
  REGION 1..14: note = CDRH3 Antibody ID V60 F01
QRTFYYDSSDYSDY

SEQ ID NO: 179 - protein, 14 aa, synthetic construct
  REGION 1..14: note = Description of Artificial Sequence: Synthetic peptide
  REGION 1..14: note = CDRH3 Antibody ID V48 E01
MRTFYYDSSDYFDY

SEQ ID NO: 180 - protein, 123 aa, synthetic construct
  REGION 1..123: note = Description of Artificial Sequence: Synthetic polypeptide
  REGION 1..123: note = VH Amino Acid Sequence Antibody ID V3 A04
EVQLVQSGAEVKKPGESLKISCKGSGYSFASYWIAWVRQMPGKGLEWMGIIYPGDSDTRYSPSFQDQVTISADKSISTAYLQWSSLKASDTAMYFCARGRTFYYDSSDYFDYWGQGTLVTVSS

SEQ ID NO: 181 - protein, 123 aa, synthetic construct
  REGION 1..123: note = Description of Artificial Sequence: Synthetic polypeptide
  REGION 1..123: note = VH Amino Acid Sequence Antibody ID V24 C01
EVQLVQSGAEVKKPGESLKISCKGSGYSFTSYWIAWVRQMPGKGLEWMGIIYPGDSDVRYSPSFQGQVTISADKSISTAYLQWSSLKASDTAMYFCARSRTFYYDSSDYFDYWGQGTLVTVSS

SEQ ID NO: 182 - protein, 123 aa, synthetic construct
  REGION 1..123: note = Description of Artificial Sequence: Synthetic polypeptide
  REGION 1..123: note = VH Amino Acid Sequence Antibody ID V27 C04
EVQLVQSGAEVKKPGESLKISCKGSGYSFTSYWIAWVRQMPGKGLEWMGIIYPGDSDTRYAPSFQGQVTISADKSISTAYLQWSSLKASDTAMYFCVRSRTFYYDSSDYFDYWGQGTLVTVSS

SEQ ID NO: 183 - protein, 123 aa, synthetic construct
  REGION 1..123: note = Description of Artificial Sequence: Synthetic polypeptide
  REGION 1..123: note = VH Amino Acid Sequence Antibody ID V40 D05
EVQLVQSGAEVKKPGESLKISCKGSGYSFGSYWIAWVRQMPGKGLEWMGIIYPGDSDVRYSPSFQGQVTISADKSISTAYLQWSSLKASDTAMYFCARQRTFYYDSSDYSDYWGQGTLVTVSS

SEQ ID NO: 184 - protein, 123 aa, synthetic construct
  REGION 1..123: note = Description of Artificial Sequence: Synthetic polypeptide
  REGION 1..123: note = VH Amino Acid Sequence Antibody ID V48 E01
EVQLVQSGAEVKKPGESLKISCKGSGYSFGSYWIAWVRQMPGKGLEWMGIIYPGDSDVRYSPSFQGQVTISADKSISTAYLQWSSLKASDTAMYFCARMRTFYYDSSDYFDYWGQGTLVTVSS

SEQ ID NO: 185 - protein, 123 aa, synthetic construct
  REGION 1..123: note = Description of Artificial Sequence: Synthetic polypeptide
  REGION 1..123: note = Heavy Chain Variable Region Amino Acid Sequences for Improved Affinity TREM2 Antibodies - VH Amino Acid Sequence
EVQLVQSGAEVKKPGESLKISCKGSGYSFNSYWIAWVRQMPGKGLEWMGTIYPGDSDTRLSPSFQGQVTISADKSISTAYLQWSSLKASDTAMYFCARSRTFYYDSSDYFDYWGQGTLVTVSS

SEQ ID NO: 186 - protein, 123 aa, synthetic construct
  REGION 1..123: note = Description of Artificial Sequence: Synthetic polypeptide
  REGION 1..123: note = VH Amino Acid Sequence Antibody ID V49 E02
EVQLVQSGAEVKKPGESLKISCKGSGYSFESYWIAWVRQMPGKGLEWMGIIYPGDSDTRYSPSFQGQVTISADKSISTAYLQWSSLKASDTAMYFCARGRTFYYDSSDYFDYWGQGTLVTVSS

SEQ ID NO: 187 - protein, 123 aa, synthetic construct
  REGION 1..123: note = Description of Artificial Sequence: Synthetic polypeptide
  REGION 1..123: note = VH Amino Acid Sequence Antibody ID V60 F01
EVQLVQSGAEVKKPGESLKISCKGSGYHFTSYWIAWVRQMPGKGLEWMGIIYPGDSDVRYSPSFQGQVTISADKSISTAYLQWSSLKASDTAMYFCARQRTFYYDSSDYSDYWGQGTLVTVSS

SEQ ID NO: 188 - protein, 123 aa, synthetic construct
  REGION 1..123: note = Description of Artificial Sequence: Synthetic polypeptide
  REGION 1..123: note = VH Amino Acid Sequence Antibody ID V73 G02
EVQLVQSGAEVKKPGESLKISCKGSGYSFGSYWIAWVRQMPGKGLEWMGIIYPGDSDTRYSPGFQGQVTISADKSISTAYLQWSSLKASDTAMYFCARGRTFYYDSSDYFDYWGQGTLVTVSS

SEQ ID NO: 189 - protein, 123 aa, synthetic construct
  REGION 1..123: note = Description of Artificial Sequence: Synthetic polypeptide
  REGION 1..123: note = VH Amino Acid Sequence Antibody ID V76 G05
EVQLVQSGAEVKKPGESLKISCKGSGYSFGSYWIAWVRQMPGKGLEWMGIIYPGDSDTRYSPEFQGQVTISADKSISTAYLQWSSLKASDTAMYFCARQRTFYYDSSDYSDYWGQGTLVTVSS

SEQ ID NO: 190 - protein, 123 aa, synthetic construct
  REGION 1..123: note = Description of Artificial Sequence: Synthetic polypeptide
  REGION 1..123: note = VH Amino Acid Sequence Antibody ID V84 H01
EVQLVQSGAEVKKPGESLKISCKGSGYGFTSYWIAWVRQMPGKGLEWMGIIYPGDSDTRYSPSFQGQVTISADKSISTAYLQWSSLKASDTAMYFCARQRTFYYDSSDYSDYWGQGTLVTVSS

SEQ ID NO: 191 - protein, 106 aa, Homo sapiens
GQPKANPTVTLFPPSSEELQANKATLVCLISDFYPGAVTVAWKADGSPVKAGVETTKPSKQSNNKYAASSYLSLTPEQWKSHRSYSCQVTHEGSTVEKTVAPTECS

SEQ ID NO: 192 - protein, 106 aa, Homo sapiens
GQPKAAPSVTLFPPSSEELQANKATLVCLISDFYPGAVTVAWKADSSPVKAGVETTTPSKQSNNKYAASSYLSLTPEQWKSHRSYSCQVTHEGSTVEKTVAPTECS

SEQ ID NO: 193 - protein, 105 aa, Homo sapiens
QPKAAPSVTLFPPSSEELQANKATLVCLISDFYPGAVTVAWKADSSPVKAGVETTTPSKQSNNKYAASSYLSLTPEQWKSHRSYSCQVTHEGSTVEKTVAPTECS

SEQ ID NO: 194 - protein, 106 aa, Homo sapiens
GQPKAAPSVTLFPPSSEELQANKATLVCLISDFYPGAVTVAWKADSSPVKAGVETTTPSKQSNNKYAASSYLSLTPEQWKSHKSYSCQVTHEGSTVEKTVAPTECS

SEQ ID NO: 195 - protein, 106 aa, Homo sapiens
GQPKAAPSVTLFPPSSEELQANKATLVCLVSDFYPGAVTVAWKADGSPVKVGVETTKPSKQSNNKYAASSYLSLTPEQWKSHRSYSCRVTHEGSTVEKTVAPAECS

SEQ ID NO: 196 - protein, 106 aa, Homo sapiens
TVAAPSVFIFPPSDEQLKSGTASVVCLLNNFYPREAKVQWKVDNALQSGNSQESVTEQDSKDSTYSLSSTLTLSKADYEKHKVYACEVTHQGLSSPVTKSFNRGEC

SEQ ID NO: 197 - protein, 107 aa, Homo sapiens [sequence omitted]

SEQ ID NO: 198 - protein, 330 aa, Homo sapiens
ASTKGPSVFPLAPSSKSTSGGTAALGCLVKDYFPEPVTVSWNSGALTSGVHTFPAVLQSSGLYSLSSVVTVPSSSLGTQTYICNVNHKPSNTKVDKKVEPKSCDKTHTCPPCPAPELLGGPSVFLFPPKPKDTLMISRTPEVTCVVVDVSHEDPEVKFNWYVDGVEVHNAKTKPREEQYNSTYRVVSVLTVLHQDWLNGKEYKCKVSNKALPAPIEKTISKAKGQPREPQVYTLPPSREEMTKNQVSLTCLVKGFYPSDIAVEWESNGQPENNYKTTPPVLDSDGSFFLYSKLTVDKSRWQQGNVFSCSVMHEALHNHYTQKSLSLSPGK

SEQ ID NO: 199 - protein, 330 aa, Homo sapiens [sequence omitted]

SEQ ID NO: 200 - protein, 330 aa, Homo sapiens
ASTKGPSVFPLAPSSKSTSGGTAALGCLVKDYFPEPVTVSWNSGALTSGVHTFPAVLQSSGLYSLSSVVTVPSSSLGTQTYICNVNHKPSNTKVDKRVEPKSCDKTHTCPPCPAPELLGGPSVFLFPPKPKDTLMISRTPEVTCVVVDVSHEDPEVKFNWYVDGVEVHNAKTKPREEQYNSTYRVVSVLTVLHQDWLNGKEYKCKVSNKALPAPIEKTISKAKGQPREPQVYTLPPSREEMTKNQVSLTCLVKGFYPSDIAVEWESNGQPENNYKTTPPVLDSDGSFFLYSKLTVDKSRWQQGNVFSCSVMHEALHNHYTQKSLSLSPGK

SEQ ID NO: 201 - protein, 330 aa, Homo sapiens
ASTKGPSVFPLAPSSKSTSGGTAALGCLVKDYFPEPVTVSWNSGALTSGVHTFPAVLQSSGLYSLSSVVTVPSSSLGTQTYICNVNHKPSNTKVDKRVEPKSCDKTHTCPPCPAPELLGGPSVFLFPPKPKDTLMISRTPEVTCVVVDVSHEDPEVKFNWYVDGVEVHNAKTKPREEQYNSTYRVVSVLTVLHQDWLNGKEYKCKVSNKALPAPIEKTISKAKGQPREPQVYTLPPSRDELTKNQVSLTCLVKGFYPSDIAVEWESNGQPENNYKTTPPVLDSDGSFFLYSKLTVDKSRWQQGNVFSCSVMHEALHNHYTQKSLSLSPGK

SEQ ID NO: 202 - protein, 330 aa, Homo sapiens
ASTKGPSVFPLAPSSKSTSGGTAALGCLVKDYFPEPVTVSWNSGALTSGVHTFPAVLQSSGLYSLSSVVTVPSSSLGTQTYICNVNHKPSNTKVDKKVEPKSCDKTHTCPPCPAPELLGGPSVFLFPPKPKDTLMISRTPEVTCVVVDVSHEDPEVKFNWYVDGVEVHNAKTKPREEQYGSTYRVVSVLTVLHQDWLNGKEYKCKVSNKALPAPIEKTISKAKGQPREPQVYTLPPSREEMTKNQVSLTCLVKGFYPSDIAVEWESNGQPENNYKTTPPVLDSDGSFFLYSKLTVDKSRWQQGNVFSCSVMHEALHNHYTQKSLSLSPGK

SEQ ID NO: 203 - protein, 330 aa, Homo sapiens
ASTKGPSVFPLAPSSKSTSGGTAALGCLVKDYFPEPVTVSWNSGALTSGVHTFPAVLQSSGLYSLSSVVTVPSSSLGTQTYICNVNHKPSNTKVDKKVEPKSCDKTHTCPPCPAPELLGGPSVFLFPPKPKDTLMISRTPEVTCVVVDVSHEDPEVKFNWYVDGVEVHNAKTKPCEEQYGSTYRCVSVLTVLHQDWLNGKEYKCKVSNKALPAPIEKTISKAKGQPREPQVYTLPPSREEMTKNQVSLTCLVKGFYPSDIAVEWESNGQPENNYKTTPPVLDSDGSFFLYSKLTVDKSRWQQGNVFSCSVMHEALHNHYTQKSLSLSPGK

SEQ ID NO: 204 - protein, 326 aa, Homo sapiens
ASTKGPSVFPLAPCSRSTSESTAALGCLVKDYFPEPVTVSWNSGALTSGVHTFPAVLQSSGLYSLSSVVTVPSSNFGTQTYTCNVDHKPSNTKVDKTVERKCCVECPPCPAPPVAGPSVFLFPPKPKDTLMISRTPEVTCVVVDVSHEDPEVQFNWYVDGVEVHNAKTKPREEQFNSTFRVVSVLTVVHQDWLNGKEYKCKVSNKGLPAPIEKTISKTKGQPREPQVYTLPPSREEMTKNQVSLTCLVKGFYPSDIAVEWESNGQPENNYKTTPPMLDSDGSFFLYSKLTVDKSRWQQGNVFSCSVMHEALHNHYTQKSLSLSPGK

SEQ ID NO: 205 - protein, 330 aa, Homo sapiens; identical to SEQ ID NO: 203

SEQ ID NO: 206 - protein, 12 aa, Homo sapiens
ERKCCVECPPCP

SEQ ID NO: 207 - protein, 110 aa, Homo sapiens
ASTKGPSVFPLAPCSRSTSESTAALGCLVKDYFPEPVTVSWNSGALTSGVHTFPAVLQSSGLYSLSSVVTVPSSNFGTQTYTCNVDHKPSNTKVDKTVERKCCVECPPCP

SEQ ID NO: 208 - DNA, 345 bp, synthetic construct
  misc_feature 1..345: note = Description of Artificial Sequence: Synthetic polynucleotide
  misc_feature 1..345: note = Anti-TREM2 Antibody Variable Region Nucleic Acid - LV Antibody ID 12G10
  source 1..345: mol_type = other DNA
caggctgtgccgactcagccgtcttccctctctgcatctcctggagtattagccagtctcacctgcaccttacgcagtggcatcaatgttggtacctacaggatatactggtaccagcagaagccagggagtcctccccagtatctcctgaggtacaaatcagactcagataagcagcagggctctggagtccccagccgcttctctggatccaaggatgcttcggccaatgcagggattttactcatctctgggctccagtctgaggatgaggctgactattactgtatgatttggtacagcagtgctgtggtattcggcggagggaccaaactgaccgtccta

SEQ ID NO: 209 - DNA, 318 bp, synthetic construct
  misc_feature 1..318: note = Description of Artificial Sequence: Synthetic polynucleotide
  misc_feature 1..318: note = Anti-TREM2 Antibody Variable Region Nucleic Acid - LV Antibody ID 26A10
  source 1..318: mol_type = other DNA
tcctatgagctgactcagccaccctcagtgtccgtgtccccaggacagacagccagcatcacctgctctggagataaattgggagataagtatgtttgctggtatcagcagaagccaggccagtcccctgtgctggtcatctatcaagatagcaagcggccctcagggatccctgagcgattctctggctccaactctgggaacacagccactctgaccatcagcgggacccaggctatggatgaggctgactattactgtcaggcgtgggacagtaacactgtggtattcggcggagggaccaagctgaccgtccta

SEQ ID NO: 210 - DNA, 318 bp, synthetic construct
  misc_feature 1..318: note = Description of Artificial Sequence: Synthetic polynucleotide
  misc_feature 1..318: note = Anti-TREM2 Antibody Variable Region Nucleic Acid - LV Antibody ID 26C10
  source 1..318: mol_type = other DNA
tcctttgagctgactcagccaccctcagtgtccgtgtccccaggacagacagccagcatcacctgctctggagataaattgggggataagtatgtttgctggtatcagcagaagccaggccagtcccctatgttggtcatctatcaagataccaagcggccctcagggatccctgaacgattctctggctccaactctgggaacacagccactctgaccatcagcgggacccaggctatggatgaggctgactattactgtcaggcgtgggacagcagcactgtggtcttcggcggagggaccaagctgaccgtccta

SEQ ID NO: 211 - DNA, 318 bp, synthetic construct
  misc_feature 1..318: note = Description of Artificial Sequence: Synthetic polynucleotide
  misc_feature 1..318: note = Anti-TREM2 Antibody Variable Region Nucleic Acid - LV Antibody ID 26F2
  source 1..318: mol_type = other DNA
tcctatgagctgactcagccaccctcagtgtccgtgtccccaggacagacagccagcatcacctgctctggagataaattgggggataagtatgtttgctggtatcagcagaagccaggccagtcccctgtgttggtcatctttcaagatagcaagcggccctcagggatccctgagcgattctctggctccaactctgggaacacagccactctgaccatcagcgggacccaggctatggatgaggctgactattactgtcaggcgtgggacagcagcactgtggtattcggcggagggaccaagctgaccgtccta

SEQ ID NO: 212 - DNA, 318 bp, synthetic construct
  misc_feature 1..318: note = Description of Artificial Sequence: Synthetic polynucleotide
  misc_feature 1..318: note = Anti-TREM2 Antibody Variable Region Nucleic Acid - LV Antibody ID 33B12
  source 1..318: mol_type = other DNA
tcctatgagctgactcagccaccctcagtgtccgtgtccccaggacagacagccagcatcacctgctctggagataaattgggggataagtatgtttgctggtatcagcagaagccaggccagtcccctgtgttggtcatctatcaagatagcaagcggccctcagggatccctgagcgattctctggctccaactctgggaacacagccactctgaccatcagcgggacccaggctatggatgaggctgactattactgtcaggcgtgggacagtagcactgtggtattcggcggagggaccaagctgaccgtccta

SEQ ID NO: 213 - DNA, 339 bp, synthetic construct
  misc_feature 1..339: note = Description of Artificial Sequence: Synthetic polynucleotide
  misc_feature 1..339: note = Anti-TREM2 Antibody Variable Region Nucleic Acid - LV Antibody ID 24C12
  source 1..339: mol_type = other DNA
ggcatcgtgatgacccagtctccagactccctggctgtgtctctgggcgagagggccaccatcaactgcaagtccagccggagtgttttgtacagctccaacaataagaactacttagcttggtaccagcagaaaccaggacagcctcctaaggtgctcatttactgggcatctacccgggaatccggggtccctgaccgattcagtggcagcgggtctgggacagatttcactctcaccatcagcagcctgcaggctgaagatgtggcagtttataactgtcagcaatattatattactccgatcaccttcggccaagggacacgactggagattaaa

SEQ ID NO: 214 - DNA, 339 bp, synthetic construct
  misc_feature 1..339: note = Description of Artificial Sequence: Synthetic polynucleotide
  misc_feature 1..339: note = Anti-TREM2 Antibody Variable Region Nucleic Acid - LV Antibody ID 24G6
  source 1..339: mol_type = other DNA
gacatcgtgatgacccagtctccagactccctggctgtgtctctgggcgagagggccaccatcaactgcaagtccagccagagtgttttatacagctccaacaataagcacttcttagcttggtaccagcagaaaccaggacagcctcctaagctgctcatttactgggcatctacccgggagtccggggtccctgaccgattcagtggcagcgggtctgggacagatttcactctcaccatcagcagcctgcaggctgaagatgtggcattttattactgtcagcaatattatagtactccgctcactttcggcggagggaccaaggtggagatcaaa

SEQ ID NO: 215 - DNA, 339 bp, synthetic construct
  misc_feature 1..339: note = Description of Artificial Sequence: Synthetic polynucleotide
  misc_feature 1..339: note = Anti-TREM2 Antibody Variable Region Nucleic Acid - LV Antibody 24A10
  source 1..339: mol_type = other DNA
gacatcgtgatgacccagtctccagactccctggctgtgtctctgggcgagagggccaccatcacctgcaagtccagccacaatgttttatacagctccaacaataagaactacttagcttggtatcagcagaaaccaggacagcctcctaaactgctcatttactgggcatctacccgggaatccggggtccctgaccgattcagtggcagcgggtctgggacagatttcactctcaccatcagcagcctgcaggctgaagatgtggcagtttattactgtcaccaatattatagtactccgtgcagttttggccaggggaccaagctggagatcaaa

SEQ ID NO: 216 - DNA, 321 bp, synthetic construct
  misc_feature 1..321: note = Description of Artificial Sequence: Synthetic polynucleotide
  misc_feature 1..321: note = Anti-TREM2 Antibody Variable Region Nucleic Acid - LV Antibody ID 10E3
  source 1..321: mol_type = other DNA
gaaatagtgatgacgcagtctccagccaccctgtctgtgtctccaggggaaagagccaccctctcctgcagggccagtcagagtgttagcagcaacttagcctggttccagcagaaacctggccaggctcccaggctcctcatctatggtgcttccaccagggccactggtattccagccaggttcagtgtcagtgggtctgggacagagttcactctcaccatcagcagcctgcagtctgaagattttgcattttattactgtctgcaggataataattggcctcccactttcggccctgggaccaaagtggatatcaaa

SEQ ID NO: 217 - DNA, 321 bp, synthetic construct
  misc_feature 1..321: note = Description of Artificial Sequence: Synthetic polynucleotide
  misc_feature 1..321: note = Anti-TREM2 Antibody Variable Region Nucleic Acid - LV Antibody ID 13E7
  source 1..321: mol_type = other DNA
gaaatagtgatgacgcagtctccagccaccctgtctgtgtctccaggggaaagagccaccctctcctgcagggccagtcagagtgttagcagcaacttagcctggttccagcagaaacctggccaggctcccaggctcctcatctatggtgcttccaccagggccactggtattccagccaggttcagtgtcagtgggtctgggacagagttcactctcaccatcagcagcctgcagtctgaagattttgcagtttattactgtctgcaggataataattggcctcccactttcggccctgggaccaaagtggatatcaaa

SEQ ID NO: 218 - DNA, 321 bp, synthetic construct
  misc_feature 1..321: note = Description of Artificial Sequence: Synthetic polynucleotide
  misc_feature 1..321: note = Anti-TREM2 Antibody Variable Region Nucleic Acid - LV Antibody ID 25F12
  source 1..321: mol_type = other DNA
gaaaaagtgatgacgcagtctccagccaccctgtctgtgtctccaggggaaagagccaccctctcctgcagggccagtcagagtgttaacaacaacttagcctggtaccagcagaaacctggccaggctcccaggctcctcatctatggtgcatccaccagggccactggtatcccagccaggttcagtggcagtgggtctgggacagagttcactctcaccatcagcagcctgcagtctgaagattttgcagtttattactgtcagcagtataataactggcctcggacgttcggccaagggaccaaggtggaaatcaaa

SEQ ID NO: 219 - DNA, 324 bp, synthetic construct
  misc_feature 1..324: note = Description of Artificial Sequence: Synthetic polynucleotide
  misc_feature 1..324: note = Anti-TREM2 Antibody Variable Region Nucleic Acid - LV Antibody ID 32E3
  source 1..324: mol_type = other DNA
gaatttgtgttgacgcagtctccaggcaccctgtctttgtctccgggggaaagagccaccctctcctgcagggccagtcagattattagcagcaactacttagcctggtaccagcagaaacctggccaggctcccaggctcctcatctatagtgcatccagcagggccactggcatcccagacaggttcagtggcagtgggtctgggacagacttcactctcaccatcagcagactggagcctgaagattttgcagtgtattactgtcagcagtttgatagctcaccgatcaccttcggccgagggacacgactggacattaaa

SEQ ID NO: 220 - DNA, 324 bp, synthetic construct
  misc_feature 1..324: note = Description of Artificial Sequence: Synthetic polynucleotide
  misc_feature 1..324: note = Anti-TREM2 Antibody Variable Region Nucleic Acid - LV Antibody ID 24F4
  source 1..324: mol_type = other DNA
gaaattgtgttgacgcagtctccaggcaccctgtctttgtctccaggggaaagagccaccctctcctgcagggccagtcagagtgttagcagcagctacttagcctggtaccagcagaaacctggccaggctcccaggctcctcatctatggtgcatccagcagggccactggcatcccagacaggttcagtggcagtgggtctgggacagacttcactctcaccatcagcagactggagcctgaagattttgcactgtattactgtcagcagtatgatacctcaccattcactttcggccctgggaccaaagtggatatcaaa

SEQ ID NO: 221 - DNA, 321 bp, synthetic construct
  misc_feature 1..321: note = Description of Artificial Sequence: Synthetic polynucleotide
  misc_feature 1..321: note = Anti-TREM2 Antibody Variable Region Nucleic Acid - LV Antibody ID 16B8
  source 1..321: mol_type = other DNA
gacatccagatgacccagtctccatcttccgtgtctgcatctgtaggagacagagtcaccgtcacttgtcgggcgagtcaggatattaacagctggttagcctggtatcagcagaaaccagggaaagcccctaagctcctgatctatgctgcatcctctttgcaaactggggtcccttcaaggttcagcggcagtggatctgggacagatttcactctcaccatcagcagcctgcagcctgaagattttgcaacttactcttgtcaacagtctaacagtttcccgatcaccttcggccaagggacacgactggagattaaa

SEQ ID NO: 222 - DNA, 321 bp, synthetic construct
  misc_feature 1..321: note = Description of Artificial Sequence: Synthetic polynucleotide
  misc_feature 1..321: note = Anti-TREM2 Antibody Variable Region Nucleic Acid - LV Antibody ID 4C5
  source 1..321: mol_type = other DNA
gacatccagatgacccagtctccatcttccgtgtctgcatctgtaggagacagagtcaccatcacttgtcgggcgagtcagggtattagcaactggttagcctggtatcagcagaaaccagggaaagcccctaagctcctgatctatgctgcatccagtttgcaagttggggtcccattaaggttcagcggcagtggatctgggacagatttcactctcaccatcagcagcctgcagcctgaagattttgcaacttactattgtcaacaggctgacagtttccctcgcaattttggccaggggaccaagctggagatcaaa

SEQ ID NO: 223 - DNA, 321 bp, synthetic construct
  misc_feature 1..321: note = Description of Artificial Sequence: Synthetic polynucleotide
  misc_feature 1..321: note = Anti-TREM2 Antibody Variable Region Nucleic Acid - LV Antibody ID 6E7 V9 A10 V30 C07 V33 C10 V44 D09 V68 F09
  source 1..321: mol_type = other DNA
gacatccagatgacccagtctccatcttccgtgtctgcatctgtaggagacagagtcaccatcacttgtcgggcgagtcagggtattagcagctggttagcctggtatcagcagaaaccagggaaagcccctaagctcctgatctatgctgcatccagtttgcaaaatggggtcccatcaaggttcagcggcagtggatctgggacagatttcactctcaccatcagcagcctgcagcctgaagattttgcaacttacttttgtcaacaggctgacagtttccctcgcacttttggccaggggaccaagctggagatcaaa

SEQ ID NO: 224 - DNA, 321 bp, synthetic construct
  misc_feature 1..321: note = Description of Artificial Sequence: Synthetic polynucleotide
  misc_feature 1..321: note = Anti-TREM2 Antibody Variable Region Nucleic Acid - LV - Antibody ID 5E3
  source 1..321: mol_type = other DNA
gacatccagatgacccagtctccatcctcactgtctgcatctgtaggagacagagtcaccatcacttgtcgggcgagtcagggcattagcaattatttagcctggtttcagcagaaaccagggaaagcccctaaatccctgatctatgctgcatccagtttgcaaagtggggtcccatcaaagttcagcggcagtggatctgggacagatttcactctcaccatcagcagcctgcagcctgaagattttgcaacttattactgccaacagtatagtacttacccattcactttcggccctgggaccaaagtggatatcaaa

SEQ ID NO: 225 - DNA, 321 bp, synthetic construct
  misc_feature 1..321: note = Description of Artificial Sequence: Synthetic polynucleotide
  misc_feature 1..321: note = Anti-TREM2 Antibody Variable Region Nucleic Acid - LV Antibody ID 4G10
  source 1..321: mol_type = other DNA
gacatccagatgacccagtctccatcctccctgtctgcatctgtaggagacagagtcaccatcacttgccgggcaagtcagggcataagaaatgatttaggctggtatcagcagaaaccagggaatgcccctaagcgcctgatctatgctgcatccagtttgccaagtggggtcccatcaaggttcagcggcagtggatctgggccagaattcactctcacaatcagcagtctgcagcctgaagattttgcaacttattactgtctacagcataatagttacccgtggacgttcggccaagggaccaaggtggaaatcaca

SEQ ID NO: 226 - DNA, 321 bp, synthetic construct
  misc_feature 1..321: note = Description of Artificial Sequence: Synthetic polynucleotide
  misc_feature 1..321: note = Anti-TREM2 Antibody Variable Region Nucleic Acid - LV Antibody ID V3 A04
  source 1..321: mol_type = other DNA
gacatccagatgacccagtctccatcttccgtgtctgcatctgtaggagacagagtcaccatcacttgtcgggcgagtcagggtattagcagctggttagcctggtatcagcagaaaccagggaaagcccctaagctcctgatctatgctgcatccagtaggcaaaatggggtcccatcaaggttcagcggcagtggatctgggacagatttcactctcaccatcagcagcctgcagcctgaagattttgcaacttacttttgtcaacaggctgacaggttccctcgcacttttggccaggggaccaagctggagatcaaa

SEQ ID NO: 227 - DNA, 321 bp, synthetic construct
  misc_feature 1..321: note = Description of Artificial Sequence: Synthetic polynucleotide
  misc_feature 1..321: note = Anti-TREM2 Antibody Variable Region Nucleic Acid - LV Antibody ID V24 C01
  source 1..321: mol_type = other DNA
gacatccagatgacccagtctccatcttccgtgtctgcatctgtaggagacagagtcaccatcacttgtcgggcgagtcagggtattagcagctggttagcctggtatcagcagaaaccagggaaagcccctaagctcctgatctatgctgcatccagtttgcaaaagggggtcccatcaaggttcagcggcagtggatctgggacagatttcactctcaccatcagcagcctgcagcctgaagattttgcaacttacttttgtcaacaggctgacagtttccctcatacttttggccaggggaccaagctggagatcaaa

SEQ ID NO: 228 - DNA, 321 bp, synthetic construct
  misc_feature 1..321: note = Description of Artificial Sequence: Synthetic polynucleotide
  misc_feature 1..321: note = Anti-TREM2 Antibody Variable Region Nucleic Acid - LV Antibody ID V27
  source 1..321: mol_type = other DNA
gacatccagatgacccagtctccatcttccgtgtctgcatctgtaggagacagagtcaccatcacttgtcgggcgagtcagggtattagcagctggttagcctggtatcagcagaaaccagggaaagcccctaagctcctgatctatgctgcatccagtttgcaacgtggggtcccatcaaggttcagcggcagtggatctgggacagatttcactctcaccatcagcagcctgcagcctgaagattttgcaacttacttttgtcaacaggctgacagtttccctcgcacttttggccaggggaccaagctggagatcaaa

SEQ ID NO: 229 - DNA, 321 bp, synthetic construct
  misc_feature 1..321: note = Description of Artificial Sequence: Synthetic polynucleotide
  misc_feature 1..321: note = Anti-TREM2 Antibody Variable Region Nucleic Acid - LV Antibody ID V40 D05
  source 1..321: mol_type = other DNA
gacatccagatgacccagtctccatcttccgtgtctgcatctgtaggagacagagtcaccatcacttgtcgggcgagtcagggtattagcagctggttagcctggtatcagcagaaaccagggaaagcccctaagctcctgatctatgctgcatccagtttgcaacttggggtcccatcaaggttcagcggcagtggatctgggacagatttcactctcaccatcagcagcctgcagcctgaagattttgcaacttacttttgtcaacaggctgaccgtttccctcgcacttttggccaggggaccaagctggagatcaaa

SEQ ID NO: 230 - DNA, 321 bp, synthetic construct
  misc_feature 1..321: note = Description of Artificial Sequence: Synthetic polynucleotide
  misc_feature 1..321: note = Anti-TREM2 Antibody Variable Region Nucleic Acid - LV Antibody ID V48 E01
  source 1..321: mol_type = other DNA
gacatccagatgacccagtctccatcttccgtgtctgcatctgtaggagacagagtcaccatcacttgtcgggcgagtcagggtattagcagctggttagcctggtatcagcagaaaccagggaaagcccctaagctcctgatctatgctgcatccagtttgcaaacgggggtcccatcaaggttcagcggcagtggatctgggacagatttcactctcaccatcagcagcctgcagcctgaagattttgcaacttacttttgtcaacaggctgacagtttgcctcgcacttttggccaggggaccaagctggagatcaaa

SEQ ID NO: 231 - DNA, 321 bp, synthetic construct
  misc_feature 1..321: note = Description of Artificial Sequence: Synthetic polynucleotide
  misc_feature 1..321: note = Anti-TREM2 Antibody Variable Region Nucleic Acid - LV Antibody ID V49 E02
  source 1..321: mol_type = other DNA
gacatccagatgacccagtctccatcttccgtgtctgcatctgtaggagacagagtcaccatcacttgtcgggcgagtcagggtattagcagctggttagcctggtatcagcagaaaccagggaaagcccctaagctcctgatctatgctgcatccagtcggcaaaatggggtcccatcaaggttcagcggcagtggatctgggacagatttcactctcaccatcagcagcctgcagcctgaagattttgcaacttacttttgtcaacaggctgacagttatcctcgcacttttggccaggggaccaagctggagatcaaa

SEQ ID NO: 232 - DNA, 321 bp, synthetic construct
  misc_feature 1..321: note = Description of Artificial Sequence: Synthetic polynucleotide
  misc_feature 1..321: note = Anti-TREM2 Antibody Variable Region Nucleic Acid - LV Antibody ID V52 E05
  source 1..321: mol_type = other DNA
gacatccagatgacccagtctccatcttccgtgtctgcatctgtaggagacagagtcaccatcacttgtcgggcgagtcagggtattagcagctggttagcctggtatcagcagaaaccagggaaagcccctaagctcctgatctatgctgcatccagtttgcaaaggggggtcccatcaaggttcagcggcagtggatctgggacagatttcactctcaccatcagcagcctgcagcctgaagattttgcaacttacttttgtcaacaggctgaccgtttccctcgcacttttggccaggggaccaagctggagatcaaa

SEQ ID NO: 233 - DNA, 321 bp, synthetic construct
  misc_feature 1..321: note = Description of Artificial Sequence: Synthetic polynucleotide
  misc_feature 1..321: note = Anti-TREM2 Antibody Variable Region Nucleic Acid - LV Antibody ID V60 F01
  source 1..321: mol_type = other DNA
gacatccagatgacccagtctccatcttccgtgtctgcatctgtaggagacagagtcaccatcacttgtcgggcgagtcagggtattagcagctggttagcctggtatcagcagaaaccagggaaagcccctaagctcctgatctatgctgcatccagtttgcaaaggggggtcccatcaaggttcagcggcagtggatctgggacagatttcactctcaccatcagcagcctgcagcctgaagattttgcaacttacttttgtgggcaggctgacagtttccctcgcacttttggccaggggaccaagctggagatcaaa

SEQ ID NO: 234 - DNA, 321 bp, synthetic construct
  misc_feature 1..321: note = Description of Artificial Sequence: Synthetic polynucleotide
  misc_feature 1..321: note = Anti-TREM2 Antibody Variable Region Nucleic Acid - LV Antibody ID V73 G02
  source 1..321: mol_type = other DNA
gacatccagatgacccagtctccatcttccgtgtctgcatctgtaggagacagagtcaccatcacttgtcgggcgagtcagggtattagcagctggttagcctggtatcagcagaaaccagggaaagcccctaagctcctgatctatgctgcatccagtcgtcaaaatggggtcccatcaaggttcagcggcagtggatctgggacagatttcactctcaccatcagcagcctgcagcctgaagattttgcaacttacttttgtcaacaggctgacagttatcctcgcacttttggccaggggaccaagctggagatcaaa

SEQ ID NO: 235 - DNA, 321 bp, synthetic construct
  misc_feature 1..321: note = Description of Artificial Sequence: Synthetic polynucleotide
  misc_feature 1..321: note = Anti-TREM2 Antibody Variable Region Nucleic Acid - LV Antibody ID V76 G05
  source 1..321: mol_type = other DNA
gacatccagatgacccagtctccatcttccgtgtctgcatctgtaggagacagagtcaccatcacttgtcgggcgagtcagggtattagcagctggttagcctggtatcagcagaaaccagggaaagcccctaagctcctgatctatgctgcatccagtttgcaaaagggggtcccatcaaggttcagcggcagtggatctgggagagatttcactctcaccatcagcagcctgcagcctgaagattttgcaacttacttttgtcaacaggctgacagtttccctcgcacttttggccaggggaccaagctggagatcaaa

SEQ ID NO: 236 - DNA, 321 bp, synthetic construct
  misc_feature 1..321: note = Description of Artificial Sequence: Synthetic polynucleotide
  misc_feature 1..321: note = Anti-TREM2 Antibody Variable Region Nucleic Acid - LV Antibody ID V84 H01
  source 1..321: mol_type = other DNA
gacatccagatgacccagtctccatcttccgtgtctgcatctgtaggagacagagtcaccatcacttgtcgggcgagtcagggtattagcagctggttagcctggtatcagcagaaaccagggaaagcccctaagctcctgatctatggtgcatccagtttgcaaaatggggtcccatcaaggttcagcggcagtggatctgggacagatttcactctcaccatcagcagcctgcagcctgaagattttgcaacttacttttgtcaacaggctgacagtttcccgcgcacttttggccaggggaccaagctggagatcaaa

SEQ ID NO: 237 - DNA, 363 bp, synthetic construct
  misc_feature 1..363: note = Description of Artificial Sequence: Synthetic polynucleotide
  misc_feature 1..363: note = Anti-TREM2 Antibody Variable Region Nucleic Acid - HV Antibody ID 12G10 24C12
  source 1..363: mol_type = other DNA
gaggtgcagctgttggagtctgggggaggcttggtacagcctggggggtccctgagactctcctgtgcagcctctggattcacctttagcagctatgccatgagctgggtccgccaggctccagggaaggggctggagtgggtctcagctattggtggtggtggtgttagcacatactgcgcagactccgtgaagggccggttcaccatctccagagacaattccaagaatacgctgtatctgcaaatgaacagcctgagagccgaggacacggccgtatattactgtgcgaaattttatatagcagtggctggttctcactttgactactggggccagggaaccctggtcaccgtctcctca

SEQ ID NO: 238 - DNA, 378 bp, synthetic construct
  misc_feature 1..378: note = Description of Artificial Sequence: Synthetic polynucleotide
  misc_feature 1..378: note = Anti-TREM2 Antibody Variable Region Nucleic Acid - HV Antibody ID 26A10
  source 1..378: mol_type = other DNA
gaggtgcaactggtggagtctgggggagccttggtacagcggggggggtccctgagactctcctgtgcagcctctagattcaccttcagtagctttggcatgagctgggtccgccaggctccagggaaggggctggagtgggtttcatacattagtagtagtagttttaccatatattacgcagactctgtgaagggccgattcaccatctccagagacaatgccaagaattcattctatctgcaaatgaacagcctgagagacgaggacacggctgtgtattactgtgcgagagaggggggtcttactatggttcggggagtctcttcctacggtttggacgtctggggccaagggaccacggtcaccgtctcctca

SEQ ID NO: 239 - DNA, 378 bp, synthetic construct
  misc_feature 1..378: note = Description of Artificial Sequence: Synthetic polynucleotide
  misc_feature 1..378: note = Anti-TREM2 Antibody Variable Region Nucleic Acid - HV 26C10
  source 1..378: mol_type = other DNA
gaggtgcaactggtggagtctgggggagccttggtacagcctggggggtccctgagactctcctgtgcagcctctggattcaccttcagtagctttggcatgagctgggtccgccaggctccagggaaggggctggagtgggtttcatacattagtagtagtagttttaccatatactacgcagactctgtgaagggccgattcaccatctccagagacaatgccaagaattcgttctatctgcaaatgaacagcctgagagacgaggacacggctgtgtatttctgtgtgagagaggggggtataactatggttcggggagtctcttcctacggtatggacgtctggggccaagggaccacggtcaccgtctcctca

SEQ ID NO: 240 - DNA, 378 bp, synthetic construct
  misc_feature 1..378: note = Description of Artificial Sequence: Synthetic polynucleotide
  misc_feature 1..378: note = Anti-TREM2 Antibody Variable Region Nucleic Acid - HV Antibody ID 26F2
  source 1..378: mol_type = other DNA
gaggtgcaactggtggagtctgggggagccttggtacagcctggggggtccctgagactctcctgtgcagcctctggattcaccttcagtagctttggcatgagctgggtccgccaggctccagggaaggggctggagtggatttcatacattagtagtagtagttttaccatatactacgcagactctgtgaagggccgattcaccatctccagagacaatgccaagaattcattctatctgcaaatgaacagcctgagagacgaggacacggctgtgtatttctgtgcgagagaggggggtattactatggttcggggagtctcttcctacggtatggacgtctggggccaagggaccacggtcaccgtctcctca

SEQ ID NO: 241 - DNA, 378 bp, synthetic construct
  misc_feature 1..378: note = Description of Artificial Sequence: Synthetic polynucleotide
  misc_feature 1..378: note = Anti-TREM2 Antibody Variable Region Nucleic Acid - HV Antibody ID 33B12
  source 1..378: mol_type = other DNA
gaggtgcaactggtggagtctgggggagccttggtacagcctggggggtccctgagactctcctgtgcagcctctggattcaccttcagtagctttggcatgagctgggtccgccaggctccagggaagggcctggagtgggtttcatacattagtaaaagtagttttaccatatactacgcagactctgtgaagggccgattcaccatctccagagacaatgccaagaattcattctatctgcaaatgaacagcctgagagacgaggacacggctgtgtattactgtgcgagagaggggggtcttactatggttcggggagtctcttcctacggtttggacgtctggggccaagggaccacggtcaccgtctcctca

SEQ ID NO: 242 - DNA, 357 bp, synthetic construct
  misc_feature 1..357: note = Description of Artificial Sequence: Synthetic polynucleotide
  misc_feature 1..357: note = Anti-TREM2 Antibody Variable Region Nucleic Acid - HV Antibody ID 24G6
  source 1..357: mol_type = other DNA
gaggtgcagctgttggagtctgggggaggcttggtacagcctggggggtccctgagactctcctgtgcagcctctggattcacctttagcagctatgccatgagctgggtccgccaggctccagggaagggactggagtgggtctcagctattagtggtagtggtggtagcacatactacgcagactccgtgaagggccggttcaccatctccagagacaattccaagaacacgctgtatctgcaaatgaacagcctgagagccgaggacacggccgtatattactgtgcgaaggcgtatacacctatggcattctttgactactggggccagggaaccctggtcaccgtctcctca

SEQ ID NO: 243 - DNA, 348 bp, synthetic construct
  misc_feature 1..348: note = Description of Artificial Sequence: Synthetic polynucleotide
  misc_feature 1..348: note = Anti-TREM2 Antibody Variable Region Nucleic Acid - HV Antibody ID 24A10
  source 1..348: mol_type = other DNA
gaggtgcaggtgttggagtctgggggaggcttggtacagcctggggggtccctgagactctcctgtgcagcctctggattcacctttagcaactatgccatgagctgggtccgccaggctccagggaaggggctggagtgggtctcagctattagtggtagtggtggtagcacatactacgcagactccgtgaagggccggttcaccatctccagagacaattccaagaacacgctgtatctgcaaatgaacagcctgagagccgaggacacggccgtatattactgtgcgaaaggagggtgggagctattttactggggccagggaaccctggtcaccgtctcctca

SEQ ID NO: 244 - DNA, 363 bp, synthetic construct
  misc_feature 1..363: note = Description of Artificial Sequence: Synthetic polynucleotide
  misc_feature 1..363: note = Anti-TREM2 Antibody Variable Region Nucleic Acid - HV Antibody ID 10E3
  source 1..363: mol_type = other DNA
gaggtgcagctggtgcagtctggagcagaggtgaaaaagcccggggagtctctgatgatctcctgtaagggttctggatacagctttaccaactactggatcggctgggtgcgccagatgcccgggaaaggcctggagtggatggggatcatctatcctggagactctgataccagatacagcccgtccttccaaggccaggtcaccatctcagccgacaagtccatcagcaccgcctacctgcagtggagcagcctgaaggcctcggacaccgccatgtatttctgtgcgagacggagacaggggatctggggtgatgctcttgatatctggggccaagggacattggtcaccgtctcttca

SEQ ID NO: 245 - DNA, 363 bp, synthetic construct
  misc_feature 1..363: note = Description of Artificial Sequence: Synthetic polynucleotide
  misc_feature 1..363: note = Anti-TREM2 Antibody Variable Region Nucleic Acid - HV Antibody ID 13E7
  source 1..363: mol_type = other DNA
gaggtgcagctggtgcagtctggagcagaggtgaaaaagcccggggagtctctgatgatctcctgtaagggttctggatacagctttaccagctactggatcggctgggtgcgccagatgcccgggaaaggcctggagtggatggggatcatctatcctggagactctgataccagatacagcccgtccttccaaggccaggtcaccatctcagccgacaagtccatcagcaccgcctacctgcagtggagcagcctgaaggcctcggacaccgccatgtatttctgtgcgagacggagacaggggatctggggtgatgctcttgatttctggggccaagggacattggtcaccgtctcttca

SEQ ID NO: 246 - DNA, 372 bp, synthetic construct
  misc_feature 1..372: note = Description of Artificial Sequence: Synthetic polynucleotide
  misc_feature 1..372: note = Anti-TREM2 Antibody Variable Region Nucleic Acid - HV Antibody ID 25F12
  variation 366: note = a, c, g, or t
  source 1..372: mol_type = other DNA
caggtgcagctacagcagtggggcgcaggactgttgaagccttcggagaccctgtccctcacctgcgctgtctatggtgggtccttcagtagttactactggagctggatccgccagcccccagggaaggggctggagtggattggggaaatcaatcatagtggaaacaccaactacaacccgtccctcaagagtcgagtcaccatatcagtagacacgtccaagaaccagttctccctgaagctgagctctgtgaccgccgcggacacggctgtgtattactgtgcgagagaggggtattacgatatcttgactggttatcatgatgcttttgatatttgggaccaagggacaatggtcaccgtnttttca

SEQ ID NO: 247 - DNA, 366 bp, synthetic construct
  misc_feature 1..366: note = Description of Artificial Sequence: Synthetic polynucleotide
  misc_feature 1..366: note = Anti-TREM2 Antibody Variable Region Nucleic Acid - HV Antibody ID 32E3
  source 1..366: mol_type = other DNA
gaggtgcagctggtgcagtctggagcagaggtgaaaaagcccggggagtctctgaagatctcctgtaagggttctggatacagctttaccagctactggatcggctgggtgcgccagatgcccgggaaaggcctggagtggatggggatcatctatcctggtgactctgataccagatacagcccgtccttccaaggccaggtcaccatctcagccgacaagtccatcagcaccgcctacctgcagtggagcaccctgaaggcctcggacaccgccatatattactgtgcgcgacatgacattataccagcagcccctggtgcttttgatatctggggccaagggacaatggtcaccgtctcttca

SEQ ID NO: 248 - DNA, 366 bp, synthetic construct
  misc_feature 1..366: note = Description of Artificial Sequence: Synthetic polynucleotide
  misc_feature 1..366: note = Anti-TREM2 Antibody Variable Region Nucleic Acid - HV Antibody ID 24F4
  source 1..366: mol_type = other DNA
gaggtgcagctggtgcagtctggagcagaggtgaaaaagcccggggagtctctgaagatctcctgtaagggttctggatacacctttaccagctactggatcggctgggtgcgccagatgcccgggaaaggcctggagtggatggggatcatctatcctggtgactctgataccagatacagcccgtccttccaaggccaggtcaccatctcagtcgacaagtccagcagcaccgcctacctgcagtggagcagcctgaaggcctcggacaccgccatatattactgtacgagacaggccatagcagtgactggtttggggggtttcgacccctggggccagggaaccctggtcaccgtctcctca

SEQ ID NO: 249 - DNA, 357 bp, synthetic construct
  misc_feature 1..357: note = Description of Artificial Sequence: Synthetic polynucleotide
  misc_feature 1..357: note = Anti-TREM2 Antibody Variable Region Nucleic Acid - HV Antibody ID 16B8
  source 1..357: mol_type = other DNA
caggttcagctggtgcagtctggagctgaggtgaagaagcctggggcctcagtgaaggtctcctgcaaggcttctggttacacctttaccaactatggtatcagctgggtgcgacaggcccctggacaagggcttgagtggatgggatggatcagcgcttacaatggtaacacaaactatgcacagaagctccagggcagagtcaccatgaccacagacacatccacgagtacagtctacatggagctgaggagcctgagatctgacgacacggccgtgtattactgtgcgagacggggatacagctatggttcctttgactactggggccagggaaccctggtcaccgtctcctca

SEQ ID NO: 250 - DNA, 369 bp, synthetic construct
  misc_feature 1..369: note = Description of Artificial Sequence: Synthetic polynucleotide
  misc_feature 1..369: note = Anti-TREM2 Antibody Variable Region Nucleic Acid - HV Antibody ID 4C5
  source 1..369: mol_type = other DNA
gaggtgcagctggtgcagtctggagcagaagtgaaaaagcccggggagtctctgaagatctcctgtaagggttctggacacagttttaccaactactggatcgcctgggtgcgccagatgcccgggaaaggcctggagtggatggggatcatctatcctggtgactctgataccagatacagcccgtccttccaaggccaggtcaccatctcagccgacaagtccatcagcaccgcctacctgcagtggagcagcctgaaggcctcggacaccgccgtgtatttctgtgcgagacaaaggacgttttactatgatagtagtggttattttgactactggggccagggaaccctggtcaccgtctcctca

SEQ ID NO: 251 - DNA, 369 bp, synthetic construct
  misc_feature 1..369: note = Description of Artificial Sequence: Synthetic polynucleotide
  misc_feature 1..369: note = Anti-TREM2 Antibody Variable Region Nucleic Acid - HV Antibody ID 6E7
  source 1..369: mol_type = other DNA
gaggtgcagctggtgcagtctggagcagaggtgaaaaagcccggggagtctctgaagatctcctgtaagggttctggatacagttttaccagctactggatcgcctgggtgcgccagatgcccgggaaaggcctggagtggatggggatcatctatcctggtgactctgataccagatacagcccgtccttccaaggccaggtcaccatctcagccgacaagtccatcagcaccgcctacctacagtggagcagcctgaaggcctcggacaccgccatgtatttctgtgcgagacaaaggacgttttattatgatagtagtgattattttgactactggggccagggaaccctggtcaccgtctcctca

SEQ ID NO: 252 - DNA, 363 bp, synthetic construct
  misc_feature 1..363: note = Description of Artificial Sequence: Synthetic polynucleotide
  misc_feature 1..363: note = Anti-TREM2 Antibody Variable Region Nucleic Acid - HV Antibody ID 5E3
  source 1..363: mol_type = other DNA
caggtgcagctggtgcagtctggggctgaggtgaagaagcctggggcctcagtgaaggtctcctgcaaggcttctggatacaccttcaccggctactatatacactgggtgcgacaggcccctggactagggcttgagtggatgggatggatcaacccttacagtggtggcacaacctctgcacagaagtttcagggcagggtcaccatgaccagggacacgtccatcagctcagcctacatggaactgagcaggctgagatctgacgacacggccgtgtattactgtgcgagagatggaggctacctggccctctacggtacggacgtctggggccaagggaccacggtcaccgtctcctca

SEQ ID NO: 253 - DNA, 366 bp, synthetic construct
  misc_feature 1..366: note = Description of Artificial Sequence: Synthetic polynucleotide
  misc_feature 1..366: note = Anti-TREM2 Antibody Variable Region Nucleic Acid - HV Antibody ID 4G10
  source 1..366: mol_type = other DNA
gaggtgcagctggtgcagtctggagcagaggtgaaaaagcccggggagtctctgaagatctcctgtaagggttctggatacagctttcccagctactggatcgcctgggtgcgccagatgcccgggaaaggcctggagtggatggggatcatctatcctggtgactctgataccagatacagcccgtccttccaaggccaggtcaccatctcagccgacaagtccatcagcaccgcctttttgaagtggagtagcctgaaggcctcggacaccgccatgtatttctgtgcgcgacagggtatagaagtgactggtacgggaggtttggacgtctggggccaagggaccacggtcaccgtctcctca

SEQ ID NO: 254 - DNA, 369 bp, synthetic construct
  misc_feature 1..369: note = Description of Artificial Sequence: Synthetic polynucleotide
  misc_feature 1..369: note = Anti-TREM2 Antibody Variable Region Nucleic Acid - HV Antibody ID V3 A04
  source 1..369: mol_type = other DNA
gaggtgcagctggtgcagtctggagcagaggtgaaaaagcccggggagtctctgaagatctcctgtaagggttctggatacagttttgcgagctactggatcgcctgggtgcgccagatgcccgggaaaggcctggagtggatggggatcatctatcctggtgactctgataccagatacagcccgtccttccaagatcaggtcaccatctcagccgacaagtccatcagcaccgcctacctacagtggagcagcctgaaggcctcggacaccgccatgtatttctgtgcgagagggaggacgttttattatgatagtagtgattattttgactactggggccagggaaccctggtcaccgtgtcctca

SEQ ID NO: 255 - DNA, 369 bp, synthetic construct
  misc_feature 1..369: note = Description of Artificial Sequence: Synthetic polynucleotide
  misc_feature 1..369: note = Anti-TREM2 Antibody Variable Region Nucleic Acid - HV Antibody ID V24 C01
  source 1..369: mol_type = other DNA
gaggtgcagctggtgcagtctggagcagaggtgaaaaagcccggggagtctctgaagatctcctgtaagggttctggatacagttttaccagctactggattgcctgggtgcgccagatgcccgggaaaggcctggagtggatggggatcatctatcctggtgactctgatgtgagatacagcccgtccttccaaggccaggtcaccatctcagccgacaagtccatcagcaccgcctacctacagtggagcagcctgaaggcctcggacaccgccatgtatttctgtgcgagatctaggacgttttattatgatagtagtgattattttgactactggggccagggaaccctggtcaccgtgtcctca

SEQ ID NO: 256 - DNA, 369 bp, synthetic construct
  misc_feature 1..369: note = Description of Artificial Sequence: Synthetic polynucleotide
  misc_feature 1..369: note = Anti-TREM2 Antibody Variable Region Nucleic Acid - HV Antibody ID V27 C04
  source 1..369: mol_type = other DNA
gaggtgcagctggtgcagtctggagcagaggtgaaaaagcccggggagtctctgaagatctcctgtaagggttctggatacagttttaccagctactggatcgcctgggtgcgccagatgcccgggaaaggcctggagtggatggggatcatctatcctggtgactctgataccagatacgctccgtccttccaaggccaggtcaccatctcagccgacaagtccatcagcaccgcctacctacagtggagcagcctgaaggcctcggacaccgccatgtatttctgtgtgagaagtaggacgttttattatgatagtagtgattattttgactactggggccagggaaccctggtcaccgtgtcctca

SEQ ID NO: 257 - DNA, 369 bp, synthetic construct
  misc_feature 1..369: note = Description of Artificial Sequence: Synthetic polynucleotide
  misc_feature 1..369: note = Anti-TREM2 Antibody Variable Region Nucleic Acid - HV Antibody ID V40 D05
  source 1..369: mol_type = other DNA
gaggtgcagctggtgcagtctggagcagaggtgaaaaagcccggggagtctctgaagatctcctgtaagggttctggatacagttttgggagctactggatcgcctgggtgcgccagatgcccgggaaaggcctggagtggatggggatcatctatcctggtgactctgatgttagatacagcccgtccttccaaggccaggtcaccatctcagccgacaagtccatcagcaccgcctacctacagtggagcagcctgaaggcctcggacaccgccatgtatttctgtgcgagacaaaggacgttttattatgatagtagtgattattcggactactggggccagggaaccctggtcaccgtgtcctca

SEQ ID NO: 258 - DNA, 369 bp, synthetic construct
  misc_feature 1..369: note = Description of Artificial Sequence: Synthetic polynucleotide
  misc_feature 1..369: note = Anti-TREM2 Antibody Variable Region Nucleic Acid - HV Antibody ID V48 E01
  source 1..369: mol_type = other DNA
gaggtgcagctggtgcagtctggagcagaggtgaaaaagcccggggagtctctgaagatctcctgtaagggttctggatacagttttggtagctactggatcgcctgggtgcgccagatgcccgggaaaggcctggagtggatggggatcatctatcctggtgactctgatgtgagatacagcccgtccttccaaggccaggtcaccatctcagccgacaagtccatcagcaccgcctacctacagtggagcagcctgaaggcctcggacaccgccatgtatttctgtgcgagaatgaggacgttttattatgatagtagtgattattttgactactggggccagggaaccctggtcaccgtgtcctca

SEQ ID NO: 259 - DNA, 369 bp, synthetic construct
  misc_feature 1..369: note = Description of Artificial Sequence: Synthetic polynucleotide
  misc_feature 1..369: note = Anti-TREM2 Antibody Variable Region Nucleic Acid - HV Antibody ID V49 E02
  source 1..369: mol_type = other DNA
gaggtgcagctggtgcagtctggagcagaggtgaaaaagcccggggagtctctgaagatctcctgtaagggttctggatacagttttaatagctactggatcgcctgggtgcgccagatgcccgggaaaggcctggagtggatggggacgatctatcctggtgactctgataccagactgagcccgtccttccaaggccaggtcaccatctcagccgacaagtccatcagcaccgcctacctacagtggagcagcctgaaggcctcggacaccgccatgtatttctgtgcgagaagtaggacgttttattatgatagtagtgattattttgactactggggccagggaaccctggtcaccgtgtcctca

SEQ ID NO: 260 - DNA, 369 bp, synthetic construct
  misc_feature 1..369: note = Description of Artificial Sequence: Synthetic polynucleotide
  misc_feature 1..369: note = Anti-TREM2 Antibody Variable Region Nucleic Acid - HV Antibody ID V52 E05
  source 1..369: mol_type = other DNA
gaggtgcagctggtgcagtctggagcagaggtgaaaaagcccggggagtctctgaagatctcctgtaagggttctggatacagttttgagagctactggatcgcctgggtgcgccagatgcccgggaaaggcctggagtggatggggatcatctatcctggtgactctgataccagatacagcccgtccttccaaggccaggtcaccatctcagccgacaagtccatcagcaccgcctacctacagtggagcagcctgaaggcctcggacaccgccatgtatttctgtgcgagagggaggacgttttattatgatagtagtgattattttgactactggggccagggaaccctggtcaccgtgtcctca

SEQ ID NO: 261 - DNA, 369 bp, synthetic construct
  misc_feature 1..369: note = Description of Artificial Sequence: Synthetic polynucleotide
  misc_feature 1..369: note = Anti-TREM2 Antibody Variable Region Nucleic Acid - HV Antibody ID V60 F01
  source 1..369: mol_type = other DNA
gaggtgcagctggtgcagtctggagcagaggtgaaaaagcccggggagtctctgaagatctcctgtaagggttctggataccattttaccagctactggatcgcctgggtgcgccagatgcccgggaaaggcctggagtggatggggatcatctatcctggtgactctgatgtgagatacagcccgtccttccaaggccaggtcaccatctcagccgacaagtccatcagcaccgcctacctacagtggagcagcctgaaggcctcggacaccgccatgtatttctgtgcgagacaaaggacgttttattatgatagtagtgattatagtgactactggggccagggaaccctggtcaccgtgtcctca

SEQ ID NO: 262 - DNA, 369 bp, synthetic construct
  misc_feature 1..369: note = Description of Artificial Sequence: Synthetic polynucleotide
  misc_feature 1..369: note = Anti-TREM2 Antibody Variable Region Nucleic Acid - HV Antibody ID V73 G02
  source 1..369: mol_type = other DNA
gaggtgcagctggtgcagtctggagcagaggtgaaaaagcccggggagtctctgaagatctcctgtaagggttctggatacagttttggtagctactggatcgcctgggtgcgccagatgcccgggaaaggcctggagtggatggggatcatctatcctggtgactctgataccagatacagcccggggttccaaggccaggtcaccatctcagccgacaagtccatcagcaccgcctacctacagtggagcagcctgaaggcctcggacaccgccatgtatttctgtgcgagagggaggacgttttattatgatagtagtgattattttgactactggggccagggaaccctggtcaccgtgtcctca

SEQ ID NO: 263 - DNA, 369 bp, synthetic construct
  misc_feature 1..369: note = Description of Artificial Sequence: Synthetic polynucleotide
  misc_feature 1..369: note = Anti-TREM2 Antibody Variable Region Nucleic Acid - HV Antibody ID V76 G05
  source 1..369: mol_type = other DNA
gaggtgcagctggtgcagtctggagcagaggtgaaaaagcccggggagtctctgaagatctcctgtaagggttctggatacagttttgggagctactggatcgcctgggtgcgccagatgcccgggaaaggcctggagtggatggggatcatctatcctggtgactctgataccagatacagcccggagttccaaggccaggtcaccatctcagccgacaagtccatcagcaccgcctacctacagtggagcagcctgaaggcctcggacaccgccatgtatttctgtgcgagacaaaggacgttttattatgatagtagtgattatagtgactactggggccagggaaccctggtcaccgtgtcctca

SEQ ID NO: 264 - DNA, 369 bp, synthetic construct
  misc_feature 1..369: note = Description of Artificial Sequence: Synthetic polynucleotide
  misc_feature 1..369: note = Anti-TREM2 Antibody Variable Region Nucleic Acid - HV Antibody ID V84 H01
  source 1..369: mol_type = other DNA
gaggtgcagctggtgcagtctggagcagaggtgaaaaagcccggggagtctctgaagatctcctgtaagggttctggatacgggtttaccagctactggatcgcctgggtgcgccagatgcccgggaaaggcctggagtggatggggatcatctatcctggtgacagtgataccagatacagcccgtccttccaaggccaggtcaccatctcagccgacaagtccatcagcaccgcctacctacagtggagcagcctgaaggcctcggacaccgccatgtatttctgtgcgagacaaaggacgttttattatgatagtagtgattattcggactactggggccagggaaccctggtcaccgtgtcctca

SEQ ID NO: 265 - protein, 22 aa, synthetic construct
  REGION 1..22: note = Description of Artificial Sequence: Synthetic peptide
  REGION 1..22: note = Secretory peptide #1
MDMRVPAQLLGLLLLWLRGARC

SEQ ID NO: 266 - protein, 19 aa, synthetic construct
  REGION 1..19: note = Description of Artificial Sequence: Synthetic peptide
  REGION 1..19: note = Secretory peptide #2
MAWALLLLTLLTQGTGSWA

SEQ ID NO: 267 - skipped

SEQ ID NO: 268 - protein, 20 aa, synthetic construct
  REGION 1..20: note = Description of Artificial Sequence: Synthetic peptide
  REGION 1..20: note = Secretory peptide #4
MEAPAQLLFLLLLWLPDTTG

SEQ ID NO: 269 - protein, 19 aa, synthetic construct
  REGION 1..19: note = Description of Artificial Sequence: Synthetic peptide
  REGION 1..19: note = Secretory peptide #5
MEWTWRVLFLVAAATGAHS

SEQ ID NO: 270 - protein, 20 aa, synthetic construct
  REGION 1..20: note = Description of Artificial Sequence: Synthetic peptide
  REGION 1..20: note = Secretory peptide #6
METPAQLLFLLLLWLPDTTG

SEQ ID NO: 271 - protein, 9 aa, synthetic construct
  REGION 1..9: note = Description of Artificial Sequence: Synthetic peptide
  REGION 1..9: note = CDRL3 Antibody ID V83
QQAVSFPRT

SEQ ID NO: 272 - protein, 19 aa, synthetic construct
  REGION 1..19: note = Description of Artificial Sequence: Synthetic peptide
  REGION 1..19: note = Secretory peptide #8
MKHLWFFLLLVAAPRWVLS

SEQ ID NO: 273 - protein, 19 aa, synthetic construct
  REGION 1..19: note = Description of Artificial Sequence: Synthetic peptide
  REGION 1..19: note = Secretory peptide #9
MEWSWVFLFFLSVTTGVHS

SEQ ID NO: 274 - protein, 22 aa, synthetic construct
  REGION 1..22: note = Description of Artificial Sequence: Synthetic peptide
  REGION 1..22: note = Secretory peptide #10
MDIRAPTQLLGLLLLWLPGAKC

SEQ ID NO: 275 - protein, 22 aa, synthetic construct
  REGION 1..22: note = Description of Artificial Sequence: Synthetic peptide
  REGION 1..22: note = Secretory peptide #11
MDIRAPTQLLGLLLLWLPGARC

SEQ ID NO: 276 - protein, 22 aa, synthetic construct
  REGION 1..22: note = Description of Artificial Sequence: Synthetic peptide
  REGION 1..22: note = Secretory peptide #12
MDTRAPTQLLGLLLLWLPGATF

SEQ ID NO: 277 - protein, 22 aa, synthetic construct
  REGION 1..22: note = Description of Artificial Sequence: Synthetic peptide
  REGION 1..22: note = Secretory peptide #13
MDTRAPTQLLGLLLLWLPGARC

SEQ ID NO: 278 - protein, 19 aa, synthetic construct
  REGION 1..19: note = Description of Artificial Sequence: Synthetic peptide
  REGION 1..19: note = Secretory peptide #14
METGLRWLLLVAVLKGVQC

SEQ ID NO: 279 - protein, 21 aa, synthetic construct
  REGION 1..21: note = Description of Artificial Sequence: Synthetic peptide
  REGION 1..21: note = Secretory peptide #15
METGLRWLLLVAVLKGVQCQE

SEQ ID NO: 280 - protein, 22 aa, synthetic construct
  REGION 1..22: note = Description of Artificial Sequence: Synthetic peptide
  REGION 1..22: note = Secretory peptide #16
MDMRAPTQLLGLLLLWLPGARC

SEQ ID NO: 281 - protein, 217 aa, Homo sapiens
APELLGGPSVFLFPPKPKDTLMISRTPEVTCVVVDVSHEDPEVKFNWYVDGVEVHNAKTKPREEQYGSTYRVVSVLTVLHQDWLNGKEYKCKVSNKALPAPIEKTISKAKGQPREPQVYTLPPSREEMTKNQVSLTCLVKGFYPSDIAVEWESNGQPENNYKTTPPVLDSDGSFFLYSKLTVDKSRWQQGNVFSCSVMHEALHNHYTQKSLSLSPGK

SEQ ID NO: 282 - protein, 217 aa, Homo sapiens
APELLGGPSVFLFPPKPKDTLMISRTPEVTCVVVDVSHEDPEVKFNWYVDGVEVHNAKTKPCEEQYGSTYRCVSVLTVLHQDWLNGKEYKCKVSNKALPAPIEKTISKAKGQPREPQVYTLPPSREEMTKNQVSLTCLVKGFYPSDIAVEWESNGQPENNYKTTPPVLDSDGSFFLYSKLTVDKSRWQQGNVFSCSVMHEALHNHYTQKSLSLSPGK

SEQ ID NO: 283 - protein, 21 aa, synthetic construct
  REGION 1..21: note = Description of Artificial Sequence: Synthetic peptide
  REGION 1..21: note = MOG peptide 35-55
MEVGWYRSPFSRVVHLYRNGK

SEQ ID NO: 284 - protein, 11 aa, synthetic construct
  REGION 1..11: note = Description of Artificial Sequence: Synthetic peptide
  REGION 1..11: note = CDRL1 Consensus for 6E7 reduced Affinity variants
  MOD_RES 1: note = R or A
  MOD_RES 8: note = S or R
XASQGISXWLA

SEQ ID NO: 285 - protein, 7 aa, synthetic construct
  REGION 1..7: note = Description of Artificial Sequence: Synthetic peptide
  REGION 1..7: note = CDRL2 Consensus for 6E7 reduced Affinity variants
  MOD_RES 1: note = A or S
  MOD_RES 3: note = S or G
XAXSLQN

SEQ ID NO: 286 - protein, 9 aa, synthetic construct
  REGION 1..9: note = Description of Artificial Sequence: Synthetic peptide
  REGION 1..9: note = CDRL3 Consensus for 6E7 reduced Affinity variants
  MOD_RES 4: note = D or V
  MOD_RES 8: note = R or L
QQAXSFPXT

SEQ ID NO: 287 - protein, 5 aa, synthetic construct
  REGION 1..5: note = Description of Artificial Sequence: Synthetic peptide
  REGION 1..5: note = CDRH1 Consensus for 6E7 reduced Affinity variants
  MOD_RES 2: note = Y or E
SXWIA

SEQ ID NO: 288 - protein, 17 aa, synthetic construct
  REGION 1..17: note = Description of Artificial Sequence: Synthetic peptide
  REGION 1..17: note = CDRH2 Consensus for 6E7 reduced Affinity variants
  MOD_RES 5: note = G or S
IIYPXDSDTRYSPSFQG

SEQ ID NO: 289 - protein, 14 aa, synthetic construct
  REGION 1..14: note = Description of Artificial Sequence: Synthetic peptide
  REGION 1..14: note = CDRH3 Consensus for 6E7 reduced Affinity variants
  MOD_RES 3: note = T or G
  MOD_RES 5: note = Y or R
  MOD_RES 6: note = Y or G
QRXFXXDSSDYFDY

SEQ ID NO: 290 - protein, 11 aa, synthetic construct
  REGION 1..11: note = Description of Artificial Sequence: Synthetic peptide
  REGION 1..11: note = CDRL1 Antibody ID V57 E10
AASQGISSWLA

SEQ ID NO: 291 - protein, 11 aa, synthetic construct
  REGION 1..11: note = Description of Artificial Sequence: Synthetic peptide
  REGION 1..11: note = CDRL1 Antibody ID V90 H07
RASQGISRWLA

SEQ ID NO: 292 - protein, 7 aa, synthetic construct
  REGION 1..7: note = Description of Artificial Sequence: Synthetic peptide
  REGION 1..7: note = CDRL2 Antibody ID V10 A11
SASSLQN

SEQ ID NO: 293 - protein, 7 aa, synthetic construct
  REGION 1..7: note = Description of Artificial Sequence: Synthetic peptide
  REGION 1..7: note = CDRL2 Antibody ID V70 F11
AAGSLQN

SEQ ID NO: 294 - protein, 9 aa, synthetic construct
  REGION 1..9: note = Description of Artificial Sequence: Synthetic peptide
  REGION 1..9: note = CDRL2 Antibody ID V23 B12
QQADSFPLT

SEQ ID NO: 295 - protein, 107 aa, synthetic construct
  REGION 1..107: note = Description of Artificial Sequence: Synthetic polypeptide
  REGION 1..107: note = VL Amino Acid Sequence Antibody ID V10 A11
DIQMTQSPSSVSASVGDRVTITCRASQGISSWLAWYQQKPGKAPKLLIYSASSLQNGVPSRFSGSGSGTDFTLTISSLQPEDFATYFCQQADSFPRTFGQGTKLEIK

SEQ ID NO: 296 - protein, 107 aa, synthetic construct
  REGION 1..107: note = Description of Artificial Sequence: Synthetic polypeptide
  REGION 1..107: note = VL Amino Acid Sequence Antibody ID V23 B12
DIQMTQSPSSVSASVGDRVTITCRASQGISSWLAWYQQKPGKAPKLLIYAASSLQNGVPSRFSGSGSGTDFTLTISSLQPEDFATYFCQQADSFPLTFGQGTKLEIK

SEQ ID NO: 297 - protein, 107 aa, synthetic construct
  REGION 1..107: note = Description of Artificial Sequence: Synthetic polypeptide
  REGION 1..107: note = VL Amino Acid Sequence Antibody ID V57 E10
DIQMTQSPSSVSASVGDRVTITCAASQGISSWLAWYQQKPGKAPKLLIYAASSLQNGVPSRFSGSGSGTDFTLTISSLQPEDFATYFCQQADSFPRTFGQGTKLEIK

SEQ ID NO: 298 - protein, 107 aa, synthetic construct
  REGION 1..107: note = Description of Artificial Sequence: Synthetic polypeptide
  REGION 1..107: note = VL Amino Acid Sequence Antibody ID V70 F11
DIQMTQSPSSVSASVGDRVTITCRASQGISSWLAWYQQKPGKAPKLLIYAAGSLQNGVPSRFSGSGSGTDFTLTISSLQPEDFATYFCQQADSFPRTFGQGTKLEIK

SEQ ID NO: 299 - protein, 107 aa, synthetic construct
  REGION 1..107: note = Description of Artificial Sequence: Synthetic polypeptide
  REGION 1..107: note = VL Amino Acid Sequence Antibody ID V83 G12
DIQMTQSPSSVSASVGDRVTITCRASQGISSWLAWYQQKPGKAPKLLIYAASSLQNGVPSRFSGSGSGTDFTLTISSLQPEDFATYFCQQAVSFPRTFGQGTKLEIK

SEQ ID NO: 300 - protein, 107 aa, synthetic construct
  REGION 1..107: note = Description of Artificial Sequence: Synthetic polypeptide
  REGION 1..107: note = VL Amino Acid Sequence Antibody ID V90 H07
DIQMTQSPSSVSASVGDRVTITCRASQGISRWLAWYQQKPGKAPKLLIYAASSLQNGVPSRFSGSGSGTDFTLTISSLQPEDFATYFCQQADSFPRTFGQGTKLEIK

SEQ ID NO: 301 - protein, 4 aa, synthetic construct
  REGION 1..4: note = Description of Artificial Sequence: Synthetic peptide
  REGION 1..4: note = FR1/ CDRH1 border Antibody ID V30 C07
SSFT

SEQ ID NO: 302 - protein, 5 aa, synthetic construct
  REGION 1..5: note = Description of Artificial Sequence: Synthetic peptide
  REGION 1..5: note = CDRH1 Antibody ID V90 H07
SEWIA

SEQ ID NO: 303 - protein, 17 aa, synthetic construct
  REGION 1..17: note = Description of Artificial Sequence: Synthetic peptide
  REGION 1..17: note = CDRH2 Antibody ID V44 D09
IIYPSDSDTRYSPSFQG

SEQ ID NO: 304 - protein, 14 aa, synthetic construct
  REGION 1..14: note = Description of Artificial Sequence: Synthetic peptide
  REGION 1..14: note = CDRH3 Antibody ID V9 A10
QRGFYYDSSDYFDY

SEQ ID NO: 305 - protein, 14 aa, synthetic construct
  REGION 1..14: note = Description of Artificial Sequence: Synthetic peptide
  REGION 1..14: note = CDRH3 Antibody ID V33 C10
QRTFYGDSSDYFDY

SEQ ID NO: 306 - protein, 14 aa, synthetic construct
  REGION 1..14: note = Description of Artificial Sequence: Synthetic peptide
  REGION 1..14: note = CDRH3 Antibody ID V68 F09
QRTFRYDSSDYFDY

SEQ ID NO: 307 - protein, 123 aa, synthetic construct
  REGION 1..123: note = Description of Artificial Sequence: Synthetic polypeptide
  REGION 1..123: note = VH Amino Acid Sequence Antibody ID V9 A10
EVQLVQSGAEVKKPGESLKISCKGSGYSFTSYWIAWVRQMPGKGLEWMGIIYPGDSDTRYSPSFQGQVTISADKSISTAYLQWSSLKASDTAMYFCARQRGFYYDSSDYFDYWGQGTLVTVSS

SEQ ID NO: 308 - protein, 123 aa, synthetic construct
  REGION 1..123: note = Description of Artificial Sequence: Synthetic polypeptide
  REGION 1..123: note = VH Amino Acid Sequence Antibody ID V30 C07
EVQLVQSGAEVKKPGESLKISCKGSGSSFTSYWIAWVRQMPGKGLEWMGIIYPGDSDTRYSPSFQGQVTISADKSISTAYLQWSSLKASDTAMYFCARQRTFYYDSSDYFDYWGQGTLVTVSS

SEQ ID NO: 309 - protein, 123 aa, synthetic construct
  REGION 1..123: note = Description of Artificial Sequence: Synthetic polypeptide
  REGION 1..123: note = VH Amino Acid Sequence Antibody ID V33 C10
EVQLVQSGAEVKKPGESLKISCKGSGYSFTSYWIAWVRQMPGKGLEWMGIIYPGDSDTRYSPSFQGQVTISADKSISTAYLQWSSLKASDTAMYFCARQRTFYGDSSDYFDYWGQGTLVTVSS

SEQ ID NO: 310 - protein, 123 aa, synthetic construct
  REGION 1..123: note = Description of Artificial Sequence: Synthetic polypeptide
  REGION 1..123: note = VH Amino Acid Sequence Antibody ID V44 D09
EVQLVQSGAEVKKPGESLKISCKGSGYSFTSYWIAWVRQMPGKGLEWMGIIYPSDSDTRYSPSFQGQVTISADKSISTAYLQWSSLKASDTAMYFCARQRTFYYDSSDYFDYWGQGTLVTVSS

SEQ ID NO: 311 - protein, 123 aa, synthetic construct
  REGION 1..123: note = Description of Artificial Sequence: Synthetic polypeptide
  REGION 1..123: note = VH Amino Acid Sequence Antibody ID V68 F09
EVQLVQSGAEVKKPGESLKISCKGSGYSFTSYWIAWVRQMPGKGLEWMGIIYPGDSDTRYSPSFQGQVTISADKSISTAYLQWSSLKASDTAMYFCARQRTFRYDSSDYFDYWGQGTLVTVSS

SEQ ID NO: 312 - protein, 123 aa, synthetic construct
  REGION 1..123: note = Description of Artificial Sequence: Synthetic polypeptide
  REGION 1..123: note = VH Amino Acid Sequence Antibody ID V90 H07
EVQLVQSGAEVKKPGESLKISCKGSGYSFTSEWIAWVRQMPGKGLEWMGIIYPGDSDTRYSPSFQGQVTISADKSISTAYLQWSSLKASDTAMYFCARQRTFYYDSSDYFDYWGQGTLVTVSS

SEQ ID NO: 313 - DNA, 321 bp, synthetic construct
  misc_feature 1..321: note = Description of Artificial Sequence: Synthetic polynucleotide
  misc_feature 1..321: note = Anti-TREM2 Antibody Variable Region Nucleic Acid - LV Antibody ID V10 A11
  source 1..321: mol_type = other DNA
gacatccagatgacccagtctccatcttccgtgtctgcatctgtaggagacagagtcaccatcacttgtcgggcgagtcagggtattagcagctggttagcctggtatcagcagaaaccagggaaagcccctaagctcctgatctattctgcatccagtttgcaaaatggggtcccatcaaggttcagcggcagtggatctgggacagatttcactctcaccatcagcagcctgcagcctgaagattttgcaacttacttttgtcaacaggctgacagtttccctcgcacttttggccaggggaccaagctggagatcaaa

SEQ ID NO: 314 - DNA, 321 bp, synthetic construct
  misc_feature 1..321: note = Description of Artificial Sequence: Synthetic polynucleotide
  misc_feature 1..321: note = Anti-TREM2 Antibody Variable Region Nucleic Acid - LV Antibody ID V23 B12
  source 1..321: mol_type = other DNA
gacatccagatgacccagtctccatcttccgtgtctgcatctgtaggagacagagtcaccatcacttgtcgggcgagtcagggtattagcagctggttagcctggtatcagcagaaaccagggaaagcccctaagctcctgatctatgctgcatccagtttgcaaaatggggtcccatcaaggttcagcggcagtggatctgggacagatttcactctcaccatcagcagcctgcagcctgaagattttgcaacttacttttgtcaacaggctgacagtttccctcttacttttggccaggggaccaagctggagatcaaa

SEQ ID NO: 315 - DNA, 321 bp, synthetic construct
  misc_feature 1..321: note = Description of Artificial Sequence: Synthetic polynucleotide
  misc_feature 1..321: note = Anti-TREM2 Antibody Variable Region Nucleic Acid - LV Antibody ID V57 E10
  source 1..321: mol_type = other DNA
gacatccagatgacccagtctccatcttccgtgtctgcatctgtaggagacagagtcaccatcacttgtgcggcgagtcagggtattagcagctggttagcctggtatcagcagaaaccagggaaagcccctaagctcctgatctatgctgcatccagtttgcaaaatggggtcccatcaaggttcagcggcagtggatctgggacagatttcactctcaccatcagcagcctgcagcctgaagattttgcaacttacttttgtcaacaggctgacagtttccctcgcacttttggccaggggaccaagctggagatcaaa

SEQ ID NO: 316 - DNA, 321 bp, synthetic construct
  misc_feature 1..321: note = Description of Artificial Sequence: Synthetic polynucleotide
  misc_feature 1..321: note = Anti-TREM2 Antibody Variable Region Nucleic Acid - LV Antibody ID V70 F11
  source 1..321: mol_type = other DNA
gacatccagatgacccagtctccatcttccgtgtctgcatctgtaggagacagagtcaccatcacttgtcgggcgagtcagggtattagcagctggttagcctggtatcagcagaaaccagggaaagcccctaagctcctgatctatgctgcagggagtttgcaaaatggggtcccatcaaggttcagcggcagtggatctgggacagatttcactctcaccatcagcagcctgcagcctgaagattttgcaacttacttttgtcaacaggctgacagtttccctcgcacttttggccaggggaccaagctggagatcaaa

SEQ ID NO: 317 - DNA, 321 bp, synthetic construct
  misc_feature 1..321: note = Description of Artificial Sequence: Synthetic polynucleotide
  misc_feature 1..321: note = Anti-TREM2 Antibody Variable Region Nucleic Acid - LV Antibody ID V83
  source 1..321: mol_type = other DNA
gacatccagatgacccagtctccatcttccgtgtctgcatctgtaggagacagagtcaccatcacttgtcgggcgagtcagggtattagcagctggttagcctggtatcagcagaaaccagggaaagcccctaagctcctgatctatgctgcatccagtttgcaaaatggggtcccatcaaggttcagcggcagtggatctgggacagatttcactctcaccatcagcagcctgcagcctgaagattttgcaacttacttttgtcaacaggctgtgagtttccctcgcacttttggccaggggaccaagctggagatcaaa

SEQ ID NO: 318 - DNA, 321 bp, synthetic construct
  misc_feature 1..321: note = Description of Artificial Sequence: Synthetic polynucleotide
  misc_feature 1..321: note = Anti-TREM2 Antibody Variable Region Nucleic Acid - LV Antibody ID V90 H07
  source 1..321: mol_type = other DNA
gacatccagatgacccagtctccatcttccgtgtctgcatctgtaggagacagagtcaccatcacttgtcgggcgagtcagggtattagcagatggttagcctggtatcagcagaaaccagggaaagcccctaagctcctgatctatgctgcatccagtttgcaaaatggggtcccatcaaggttcagcggcagtggatctgggacagatttcactctcaccatcagcagcctgcagcctgaagattttgcaacttacttttgtcaacaggctgacagtttccctcgcacttttggccaggggaccaagctggagatcaaa

SEQ ID NO: 319 - DNA, 369 bp, synthetic construct
  misc_feature 1..369: note = Description of Artificial Sequence: Synthetic polynucleotide
  misc_feature 1..369: note = Anti-TREM2 Antibody Variable Region Nucleic Acid - HV Antibody ID V9 A10
  source 1..369: mol_type = other DNA
gaggtgcagctggtgcagtctggagcagaggtgaaaaagcccggggagtctctgaagatctcctgtaagggttctggatacagttttaccagctactggatcgcctgggtgcgccagatgcccgggaaaggcctggagtggatggggatcatctatcctggtgactctgataccagatacagcccgtccttccaaggccaggtcaccatctcagccgacaagtccatcagcaccgcctacctacagtggagcagcctgaaggcctcggacaccgccatgtatttctgtgcgagacaaagggggttttattatgatagtagtgattattttgactactggggccagggaaccctggtcaccgtgtcctca

SEQ ID NO: 320 - DNA, 369 bp, synthetic construct
  misc_feature 1..369: note = Description of Artificial Sequence: Synthetic polynucleotide
  misc_feature 1..369: note = Anti-TREM2 Antibody Variable Region Nucleic Acid - HV Antibody ID V10 A11 V23 B12 V57 E10 V70 F11 V83 G12
  source 1..369: mol_type = other DNA
gaggtgcagctggtgcagtctggagcagaggtgaaaaagcccggggagtctctgaagatctcctgtaagggttctggatacagttttaccagctactggatcgcctgggtgcgccagatgcccgggaaaggcctggagtggatggggatcatctatcctggtgactctgataccagatacagcccgtccttccaaggccaggtcaccatctcagccgacaagtccatcagcaccgcctacctacagtggagcagcctgaaggcctcggacaccgccatgtatttctgtgcgagacaaaggacgttttattatgatagtagtgattattttgactactggggccagggaaccctggtcaccgtgtcctca

SEQ ID NO: 321 - DNA, 369 bp, synthetic construct
  misc_feature 1..369: note = Description of Artificial Sequence: Synthetic polynucleotide
  misc_feature 1..369: note = Anti-TREM2 Antibody Variable Region Nucleic Acid - HV Antibody ID V30 C07
  source 1..369: mol_type = other DNA
gaggtgcagctggtgcagtctggagcagaggtgaaaaagcccggggagtctctgaagatctcctgtaagggttctggatcgagttttaccagctactggatcgcctgggtgcgccagatgcccgggaaaggcctggagtggatggggatcatctatcctggtgactctgataccagatacagcccgtccttccaaggccaggtcaccatctcagccgacaagtccatcagcaccgcctacctacagtggagcagcctgaaggcctcggacaccgccatgtatttctgtgcgagacaaaggacgttttattatgatagtagtgattattttgactactggggccagggaaccctggtcaccgtgtcctca

SEQ ID NO: 322 - DNA, 369 bp, synthetic construct
  misc_feature 1..369: note = Description of Artificial Sequence: Synthetic polynucleotide
  misc_feature 1..369: note = Anti-TREM2 Antibody Variable Region Nucleic Acid - HV Antibody ID V33 C10
  source 1..369: mol_type = other DNA
gaggtgcagctggtgcagtctggagcagaggtgaaaaagcccggggagtctctgaagatctcctgtaagggttctggatacagttttaccagctactggatcgcctgggtgcgccagatgcccgggaaaggcctggagtggatggggatcatctatcctggtgactctgataccagatacagcccgtccttccaaggccaggtcaccatctcagccgacaagtccatcagcaccgcctacctacagtggagcagcctgaaggcctcggacaccgccatgtatttctgtgcgagacaaaggacgttttatggggatagtagtgattattttgactactggggccagggaaccctggtcaccgtgtcctca

SEQ ID NO: 323 - DNA, 369 bp, synthetic construct
  misc_feature 1..369: note = Description of Artificial Sequence: Synthetic polynucleotide
  misc_feature 1..369: note = Anti-TREM2 Antibody Variable Region Nucleic Acid - HV Antibody ID V44 D09
  source 1..369: mol_type = other DNA
gaggtgcagctggtgcagtctggagcagaggtgaaaaagcccggggagtctctgaagatctcctgtaagggttctggatacagttttaccagctactggatcgcctgggtgcgccagatgcccgggaaaggcctggagtggatggggatcatctatcctagtgactctgataccagatacagcccgtccttccaaggccaggtcaccatctcagccgacaagtccatcagcaccgcctacctacagtggagcagcctgaaggcctcggacaccgccatgtatttctgtgcgagacaaaggacgttttattatgatagtagtgattattttgactactggggccagggaaccctggtcaccgtgtcctca

SEQ ID NO: 324 - DNA, 369 bp, synthetic construct
  misc_feature 1..369: note = Description of Artificial Sequence: Synthetic polynucleotide
  misc_feature 1..369: note = Anti-TREM2 Antibody Variable Region Nucleic Acid - HV Antibody ID V68 F09
  source 1..369: mol_type = other DNA
gaggtgcagctggtgcagtctggagcagaggtgaaaaagcccggggagtctctgaagatctcctgtaagggttctggatacagttttaccagctactggatcgcctgggtgcgccagatgcccgggaaaggcctggagtggatggggatcatctatcctggtgactctgataccagatacagcccgtccttccaaggccaggtcaccatctcagccgacaagtccatcagcaccgcctacctacagtggagcagcctgaaggcctcggacaccgccatgtatttctgtgcgagacaaaggacgtttaggtatgatagtagtgattattttgactactggggccagggaaccctggtcaccgtgtcctca

SEQ ID NO: 325 - DNA, 369 bp, synthetic construct
  misc_feature 1..369: note = Description of Artificial Sequence: Synthetic polynucleotide
  misc_feature 1..369: note = Anti-TREM2 Antibody Variable Region Nucleic Acid - HV Antibody ID V90 H07
  source 1..369: mol_type = other DNA
gaggtgcagctggtgcagtctggagcagaggtgaaaaagcccggggagtctctgaagatctcctgtaagggttctggatacagttttaccagcgagtggatcgcctgggtgcgccagatgcccgggaaaggcctggagtggatggggatcatctatcctggtgactctgataccagatacagcccgtccttccaaggccaggtcaccatctcagccgacaagtccatcagcaccgcctacctacagtggagcagcctgaaggcctcggacaccgccatgtatttctgtgcgagacaaaggacgttttattatgatagtagtgattattttgactactggggccagggaaccctggtcaccgtgtcctca

SEQ ID NO: 326 - protein, 113 aa, synthetic construct
  REGION 1..113: note = Description of Artificial Sequence: Synthetic polypeptide
  REGION 1..113: note = LC variable region sequence 24G6
DIVMTQSPDSLAVSLGERATINCKSSQSVLYSSNNKHFLAWYQQKPGQPPKLLIYWASTRESGVPDRFSGSGSGTDFTLTISSLQAEDVAVYYCQQYYSTPLTFGGGTKVEIK

SEQ ID NO: 327 - protein, 119 aa, synthetic construct
  REGION 1..119: note = Description of Artificial Sequence: Synthetic polypeptide
  REGION 1..119: note = HC variable region sequence 24G6
EVQLLESGGGLVQPGGSLRLSCAASGFTFSSYAMSWVRQAPGKGLEWVSAISGSGGSTYYAESVKGRFTISRDNSKNTLYLQMNSLRAEDTAVYYCAKAYTPMAFFDYWGQGTLVTVSS

SEQ ID NO: 328 - protein, 107 aa, synthetic construct
  REGION 1..107: note = Description of Artificial Sequence: Synthetic polypeptide
  REGION 1..107: note = LC variable region sequence 6E7
DIQMTQSPSSVSASVGDRVTITCRASQGISSWLAWYQQKPGKAPKLLIYAASSLQSGVPSRFSGSGSGTDFTLTISSLQPEDFATYFCQQADAFPRTFGQGTKLEIK

SEQ ID NO: 329 - protein, 123 aa, synthetic construct
  REGION 1..123: note = Description of Artificial Sequence: Synthetic polypeptide
  REGION 1..123: note = HC variable region sequence 6E7
EVQLVQSGAEVKKPGESLKISCKGSGYSFTSYWIAWVRQMPGKGLEWMGIIYPGDADARYSPSFQGQVTISADKSISTAYLQWSSLKASDTAMYFCARQRTFYYDSSDYFDYWGQGTLVTVSS

SEQ ID NO: 330 - protein, 107 aa, synthetic construct
  REGION 1..107: note = Description of Artificial Sequence: Synthetic polypeptide
  REGION 1..107: note = LC variable region sequence 13E7
EIVMTQSPATLSVSPGERATLSCRASQSVSSNLAWFQQKPGQAPRLLIYGASTRATGIPARFSGSGSGTEFTLTISSLQPEDFAVYYCLQDNNFPPTFGQGTKVDIK

SEQ ID NO: 331 - protein, 121 aa, synthetic construct
  REGION 1..121: note = Description of Artificial Sequence: Synthetic polypeptide
  REGION 1..121: note = HC variable region sequence 13E7
EVQLVQSGAEVKKPGESLKISCKGSGYSFTSYWIGWVRQMPGKGLEWMGIIYPGDADARYSPSFQGQVTISADKSISTAYLQWSSLKASDTAMYFCARRRQGIFGDALDFWGQGTLVTVSS

SEQ ID NO: 332 - protein, 107 aa, synthetic construct
  REGION 1..107: note = Description of Artificial Sequence: Synthetic polypeptide
  REGION 1..107: note = LC variable region sequence 5E3
DIQMTQSPSSLSASVGDRVTITCRASQGISNYLAWYQQKPGKAPKSLIYAASSLQSGVPSRFSGSGSGTDFTLTISSLQPEDFATYYCQQYSTYPFTFGQGTKVDIK

SEQ ID NO: 333 - protein, 121 aa, synthetic construct
  REGION 1..121: note = Description of Artificial Sequence: Synthetic polypeptide
  REGION 1..121: note = HC variable region sequence 5E3
QVQLVQSGAEVKKPGASVKVSCKASGYTFTGYYIHWVRQAPGQGLEWMGWINPYSGGTTSAQKFQGRVTMTRDTSTSSAYMELSRLRSDDTAVYYCARDAGYLALYGTDVWGQGTLVTVSS

SEQ ID NO: 334 - protein, 242 aa, synthetic construct
  REGION 1..242: note = Description of Artificial Sequence: Synthetic polypeptide
  REGION 1..242: note = AA sequence LC SST28347
MDMRVPAQLLGLLLLWLRGARCDIVMTQSPDSLAVSLGERATINCKSSQSVLYSSNNKHFLAWYQQKPGQPPKLLIYWASTRESGVPDRFSGSGSGTDFTLTISSLQAEDVAVYYCQQYYSTPLTFGGGTKVEIKRTVAAPSVFIFPPSDEQLKSGTASVVCLLNNFYPREAKVQWKVDNALQSGNSQESVTEQDSKDSTYSLSSTLTLSKADYEKHKVYACEVTHQGLSSPVTKSFNRGEC

SEQ ID NO: 335 - protein, 471 aa, synthetic construct
  REGION 1..471: note = Description of Artificial Sequence: Synthetic polypeptide
  REGION 1..471: note = AA sequence HC SST28347
MDMRVPAQLLGLLLLWLRGARCEVQLLESGGGLVQPGGSLRLSCAASGFTFSSYAMSWVRQAPGKGLEWVSAISGSGGSTYYAESVKGRFTISRDNSKNTLYLQMNSLRAEDTAVYYCAKAYTPMAFFDYWGQGTLVTVSSASTKGPSVFPLAPSSKSTSGGTAALGCLVKDYFPEPVTVSWNSGALTSGVHTFPAVLQSSGLYSLSSVVTVPSSSLGTQTYICNVNHKPSNTKVDKKVEPKSCDKTHTCPPCPAPELLGGPSVFLFPPKPKDTLMISRTPEVTCVVVDVSHEDPEVKFNWYVDGVEVHNAKTKPCEEQYGSTYRCVSVLTVLHQDWLNGKEYKCKVSNKALPAPIEKTISKAKGQPREPQVYTLPPSREEMTKNQVSLTCLVKGFYPSDIAVEWESNGQPENNYKTTPPVLDSDGSFFLYSKLTVDKSRWQQGNVFSCSVMHEALHNHYTQKSLSLSPGK

SEQ ID NO: 336 - protein, 468 aa, synthetic construct
  REGION 1..468: note = Description of Artificial Sequence: Synthetic polypeptide
  REGION 1..468: note = AA sequence HC SST204812
MDMRVPAQLLGLLLLWLRGARCEVQLLESGGGLVQPGGSLRLSCAASGFTFSSYAMSWVRQAPGKGLEWVSAISGSGGSTYYAESVKGRFTISRDNSKNTLYLQMNSLRAEDTAVYYCAKAYTPMAFFDYWGQGTLVTVSSASTKGPSVFPLAPSSRSTSESTAALGCLVKDYFPEPVTVSWNSGALTSGVHTFPAVLQSSGLYSLSSVVTVPSSNFGTQTYTCNVDHKPSNTKVDKTVERKCCVECPPCPAPELLGGPSVFLFPPKPKDTLMISRTPEVTCVVVDVSHEDPEVKFNWYVDGVEVHNAKTKPCEEQYGSTYRCVSVLTVLHQDWLNGKEYKCKVSNKALPAPIEKTISKAKGQPREPQVYTLPPSREEMTKNQVSLTCLVKGFYPSDIAVEWESNGQPENNYKTTPPVLDSDGSFFLYSKLTVDKSRWQQGNVFSCSVMHEALHNHYTQKSLSLSPGK

SEQ ID NO: 337 - protein, 236 aa, synthetic construct
  REGION 1..236: note = Description of Artificial Sequence: Synthetic polypeptide
  REGION 1..236: note = AA sequence SST29857
MDMRVPAQLLGLLLLWLRGARCDIQMTQSPSSVSASVGDRVTITCRASQGISSWLAWYQQKPGKAPKLLIYAASSLQSGVPSRFSGSGSGTDFTLTISSLQPEDFATYFCQQADAFPRTFGQGTKLEIKRTVAAPSVFIFPPSDEQLKSGTASVVCLLNNFYPREAKVQWKVDNALQSGNSQESVTEQDSKDSTYSLSSTLTLSKADYEKHKVYACEVTHQGLSSPVTKSFNRGEC

SEQ ID NO: 338 - protein, 472 aa, synthetic construct
  REGION 1..472: note = Description of Artificial Sequence: Synthetic polypeptide
  REGION 1..472: note = AA sequence LC SST29857
MDMRVPAQLLGLLLLWLRGARCEVQLVQSGAEVKKPGESLKISCKGSGYSFTSYWIAWVRQMPGKGLEWMGIIYPGDADARYSPSFQGQVTISADKSISTAYLQWSSLKASDTAMYFCARQRTFYYDSSDYFDYWGQGTLVTVSSASTKGPSVFPLAPSSRSTSESTAALGCLVKDYFPEPVTVSWNSGALTSGVHTFPAVLQSSGLYSLSSVVTVPSSNFGTQTYTCNVDHKPSNTKVDKTVERKCCVECPPCPAPELLGGPSVFLFPPKPKDTLMISRTPEVTCVVVDVSHEDPEVKFNWYVDGVEVHNAKTKPCEEQYGSTYRCVSVLTVLHQDWLNGKEYKCKVSNKALPAPIEKTISKAKGQPREPQVYTLPPSREEMTKNQVSLTCLVKGFYPSDIAVEWESNGQPENNYKTTPPVLDSDGSFFLYSKLTVDKSRWQQGNVFSCSVMHEALHNHYTQKSLSLSPGK

SEQ ID NO: 339 - protein, 236 aa, synthetic construct
  REGION 1..236: note = Description of Artificial Sequence: Synthetic polypeptide
  REGION 1..236: note = AA sequence LC SST202443
MDMRVPAQLLGLLLLWLRGARCEIVMTQSPATLSVSPGERATLSCRASQSVSSNLAWFQQKPGQAPRLLIYGASTRATGIPARFSGSGSGTEFTLTISSLQPEDFAVYYCLQDNNFPPTFGQGTKVDIKRTVAAPSVFIFPPSDEQLKSGTASVVCLLNNFYPREAKVQWKVDNALQSGNSQESVTEQDSKDSTYSLSSTLTLSKADYEKHKVYACEVTHQGLSSPVTKSFNRGEC

SEQ ID NO: 340 - protein, 473 aa, synthetic construct
  REGION 1..473: note = Description of Artificial Sequence: Synthetic polypeptide
  REGION 1..473: note = AA sequence HC SST202443
MDMRVPAQLLGLLLLWLRGARCEVQLVQSGAEVKKPGESLKISCKGSGYSFTSYWIGWVRQMPGKGLEWMGIIYPGDADARYSPSFQGQVTISADKSISTAYLQWSSLKASDTAMYFCARRRQGIFGDALDFWGQGTLVTVSSASTKGPSVFPLAPSSKSTSGGTAALGCLVKDYFPEPVTVSWNSGALTSGVHTFPAVLQSSGLYSLSSVVTVPSSSLGTQTYICNVNHKPSNTKVDKKVEPKSCDKTHTCPPCPAPELLGGPSVFLFPPKPKDTLMISRTPEVTCVVVDVSHEDPEVKFNWYVDGVEVHNAKTKPCEEQYGSTYRCVSVLTVLHQDWLNGKEYKCKVSNKALPAPIEKTISKAKGQPREPQVYTLPPSREEMTKNQVSLTCLVKGFYPSDIAVEWESNGQPENNYKTTPPVLDSDGSFFLYSKLTVDKSRWQQGNVFSCSVMHEALHNHYTQKSLSLSPGK

SEQ ID NO: 341 - protein, 236 aa, synthetic construct
  REGION 1..236: note = Description of Artificial Sequence: Synthetic polypeptide
  REGION 1..236: note = AA sequence LC SST29825
MDMRVPAQLLGLLLLWLRGARCDIQMTQSPSSLSASVGDRVTITCRASQGISNYLAWYQQKPGKAPKSLIYAASSLQSGVPSRFSGSGSGTDFTLTISSLQPEDFATYYCQQYSTYPFTFGQGTKVDIKRTVAAPSVFIFPPSDEQLKSGTASVVCLLNNFYPREAKVQWKVDNALQSGNSQESVTEQDSKDSTYSLSSTLTLSKADYEKHKVYACEVTHQGLSSPVTKSFNRGEC

SEQ ID NO: 342 - protein, 470 aa, synthetic construct
  REGION 1..470: note = Description of Artificial Sequence: Synthetic polypeptide
  REGION 1..470: note = AA sequence HC SST29825
MDMRVPAQLLGLLLLWLRGARCQVQLVQSGAEVKKPGASVKVSCKASGYTFTGYYIHWVRQAPGQGLEWMGWINPYSGGTTSAQKFQGRVTMTRDTSTSSAYMELSRLRSDDTAVYYCARDAGYLALYGTDVWGQGTLVTVSSASTKGPSVFPLAPSSRSTSESTAALGCLVKDYFPEPVTVSWNSGALTSGVHTFPAVLQSSGLYSLSSVVTVPSSNFGTQTYTCNVDHKPSNTKVDKTVERKCCVECPPCPAPELLGGPSVFLFPPKPKDTLMISRTPEVTCVVVDVSHEDPEVKFNWYVDGVEVHNAKTKPCEEQYGSTYRCVSVLTVLHQDWLNGKEYKCKVSNKALPAPIEKTISKAKGQPREPQVYTLPPSREEMTKNQVSLTCLVKGFYPSDIAVEWESNGQPENNYKTTPPVLDSDGSFFLYSKLTVDKSRWQQGNVFSCSVMHEALHNHYTQKSLSLSPGK

SEQ ID NO: 343 - DNA, 339 bp, synthetic construct
  misc_feature 1..339: note = Description of Artificial Sequence: Synthetic polynucleotide
  misc_feature 1..339: note = LC variable region sequence SST28347 and SST204812
  source 1..339: mol_type = other DNA
gacatcgtgatgacccagtctccagactccctggctgtgtctctgggcgagagggccaccatcaactgcaagtccagccagagtgttttatacagctccaacaataagcacttcttagcttggtaccagcagaaaccaggacagcctcctaagctgctcatttactgggcatctacccgggagtccggggtccctgaccgattcagtggcagcgggtctgggacagatttcactctcaccatcagcagcctgcaggctgaagatgtggcagtttattactgtcagcaatattatagtactccgctcactttcggcggagggaccaaggtggagatcaaa

SEQ ID NO: 344 - DNA, 357 bp, synthetic construct
  misc_feature 1..357: note = Description of Artificial Sequence: Synthetic polynucleotide
  misc_feature 1..357: note = HC variable region sequence SST28347 and SST204812
  source 1..357: mol_type = other DNA
gaggtgcagctgttggagtctgggggaggcttggtacagcctggggggtccctgagactctcctgtgcagcctctggattcacctttagcagctatgccatgagctgggtccgccaggctccagggaagggactggagtgggtctcagctattagtggtagtggtggtagcacatactacgcagaatccgtgaagggccggttcaccatctccagagacaattccaagaacacgctgtatctgcaaatgaacagcctgagagccgaggacacggccgtatattactgtgcgaaggcgtatacacctatggcattctttgactactggggccagggaaccctggtcaccgtctcctca

SEQ ID NO: 345 - DNA, 321 bp, synthetic construct
  misc_feature 1..321: note = Description of Artificial Sequence: Synthetic polynucleotide
  misc_feature 1..321: note = LC variable region sequence SST29857
  source 1..321: mol_type = other DNA
gacatccagatgacccagtctccatcttccgtgtctgcatctgtaggagacagagtcaccatcacttgtcgggcgagtcagggtattagcagctggttagcctggtatcagcagaaaccagggaaagcccctaagctcctgatctatgctgcatccagtttgcaaagtggggtcccatcaaggttcagcggcagtggatctgggacagatttcactctcaccatcagcagcctgcagcctgaagattttgcaacttacttttgtcaacaggctgacgctttccctcgcacttttggccaggggaccaagctggagatcaaa

SEQ ID NO: 346 - DNA, 369 bp, synthetic construct
  misc_feature 1..369: note = Description of Artificial Sequence: Synthetic polynucleotide
  misc_feature 1..369: note = HC variable region sequence SST29857
  source 1..369: mol_type = other DNA
gaggtgcagctggtgcagtctggagcagaggtgaaaaagcccggggagtctctgaagatctcctgtaagggttctggatacagttttaccagctactggatcgcctgggtgcgccagatgcccgggaaaggcctggagtggatggggatcatctatcctggtgacgctgatgccagatacagcccgtccttccaaggccaggtcaccatctcagccgacaagtccatcagcaccgcctacctacagtggagcagcctgaaggcctcggacaccgccatgtatttctgtgcgagacaaaggacgttttattatgatagtagtgattattttgactactggggccagggaaccctggtcaccgtgtcctca

SEQ ID NO: 347 - DNA, 321 bp, synthetic construct
  misc_feature 1..321: note = Description of Artificial Sequence: Synthetic polynucleotide
  misc_feature 1..321: note = LC variable region sequence SST202443
  source 1..321: mol_type = other DNA
gaaatagtgatgacgcagtctccagccaccctgtctgtgtctccaggggaaagagccaccctctcctgcagggccagtcagagtgttagcagcaacttagcctggttccagcagaaacctggccaggctcccaggctcctcatctatggtgcttccaccagggccactggtattccagccaggttcagtggcagtgggtctgggacagagttcactctcaccatcagcagcctgcagcctgaagattttgcagtttattactgtctgcaggataataatttccctcccactttcggccaagggaccaaagtggatatcaaa

SEQ ID NO: 348 - DNA, 363 bp, synthetic construct
  misc_feature 1..363: note = Description of Artificial Sequence: Synthetic polynucleotide
  misc_feature 1..363: note = HC variable region sequence SST202443
  source 1..363: mol_type = other DNA
gaggtgcagctggtgcagtctggagcagaggtgaaaaagcccggggagtctctgaagatctcctgtaagggttctggatacagctttaccagctactggatcggctgggtgcgccagatgcccgggaaaggcctggagtggatggggatcatctatcctggagatgctgatgccagatacagcccgtccttccaaggccaggtcaccatctcagccgacaagtccatcagcaccgcctacctgcagtggagcagcctgaaggcctcggacaccgccatgtatttctgtgcgaggcggagacaggggatcttcggtgatgctcttgatttctggggccaagggacattggtcaccgtgtcttca

SEQ ID NO: 349 - DNA, 321 bp, synthetic construct
  misc_feature 1..321: note = Description of Artificial Sequence: Synthetic polynucleotide
  misc_feature 1..321: note = LC variable region sequence SST29825
  source 1..321: mol_type = other DNA
gacatccagatgacccagtctccatcctcactgtctgcatctgtaggagacagagtcaccatcacttgtcgggcgagtcagggcattagcaattatttagcctggtatcagcagaaaccagggaaagcccctaaatccctgatctatgctgcatccagtttgcaaagtggggtcccatcaaggttcagcggcagtggatctgggacagatttcactctcaccatcagcagcctgcagcctgaagattttgcaacttattactgccaacagtatagtacttacccattcactttcggccaagggaccaaagtggatatcaaa

SEQ ID NO: 350 - DNA, 363 bp, synthetic construct
  misc_feature 1..363: note = Description of Artificial Sequence: Synthetic polynucleotide
  misc_feature 1..363: note = HC variable region sequence SST29825
  source 1..363: mol_type = other DNA
caggtgcagctggtgcagtctggggctgaggtgaagaagcctggggcctcagtgaaggtgtcctgcaaggcttctggatacaccttcaccggctactatatccactgggtgcgacaggcccctggacaagggcttgagtggatgggatggatcaacccttacagtggtggcacaacctctgcacagaagtttcagggcagggtcaccatgaccagggacacgtccaccagctcagcctacatggaactgagcaggctgagatctgacgacacggccgtgtattactgtgcgagagatgcaggctacctggccctctacggtacggacgtctggggccaagggaccttggtcaccgtgtcctca

SEQ ID NO: 351 - DNA, 726 bp, synthetic construct
  misc_feature 1..726: note = Description of Artificial Sequence: Synthetic polynucleotide
  misc_feature 1..726: note = NA sequence LC SST28347
  source 1..726: mol_type = other DNA
atggacatgagggtgcccgctcagctcctggggctcctgctgctgtggctgagaggtgcgcgctgtgacatcgtgatgacccagtctccagactccctggctgtgtctctgggcgagagggccaccatcaactgcaagtccagccagagtgttttatacagctccaacaataagcacttcttagcttggtaccagcagaaaccaggacagcctcctaagctgctcatttactgggcatctacccgggagtccggggtccctgaccgattcagtggcagcgggtctgggacagatttcactctcaccatcagcagcctgcaggctgaagatgtggcagtttattactgtcagcaatattatagtactccgctcactttcggcggagggaccaaggtggagatcaaacgaacggtggctgcaccatctgtcttcatcttcccgccatctgatgagcagttgaaatctggaactgcctctgttgtgtgcctgctgaataacttctatcccagagaggccaaagtacagtggaaggtggataacgccctccaatcgggtaactcccaggagagtgtcacagagcaggacagcaaggacagcacctacagcctcagcagcaccctgacgctgagcaaagcagactacgagaaacacaaagtctacgcctgcgaagtcacccatcagggcctgagctcgcccgtcacaaagagcttcaacaggggagagtgt

SEQ ID NO: 352 - DNA, 1413 bp, synthetic construct
  misc_feature 1..1413: note = Description of Artificial Sequence: Synthetic polynucleotide
  misc_feature 1..1413: note = NA sequence HC SST28347
  source 1..1413: mol_type = other DNA
atggacatgagggtgcccgctcagctcctggggctcctgctgctgtggctgagaggtgcgcgctgtgaggtgcagctgttggagtctgggggaggcttggtacagcctggggggtccctgagactctcctgtgcagcctctggattcacctttagcagctatgccatgagctgggtccgccaggctccagggaagggactggagtgggtctcagctattagtggtagtggtggtagcacatactacgcagaatccgtgaagggccggttcaccatctccagagacaattccaagaacacgctgtatctgcaaatgaacagcctgagagccgaggacacggccgtatattactgtgcgaaggcgtatacacctatggcattctttgactactggggccagggaaccctggtcaccgtctcctcagcctccaccaagggcccatcggtcttccccctggcaccctcctccaagagcacctctgggggcacagcggccctgggctgcctggtcaaggactacttccccgaaccggtgacggtgtcgtggaactcaggcgccctgaccagcggcgtgcacaccttcccggctgtcctacagtcctcaggactctactccctcagcagcgtggtgaccgtgccctccagcagcttgggcacccagacctacatctgcaacgtgaatcacaagcccagcaacaccaaggtggacaagaaagttgagcccaaatcttgtgacaaaactcacacatgcccaccgtgcccagcacctgaactcctggggggaccgtcagtcttcctcttccccccaaaacccaaggacaccctcatgatctcccggacccctgaggtcacatgcgtggtggtggacgtgagccacgaagaccctgaggtcaagttcaactggtacgtggacggcgtggaggtgcataatgccaagacaaagccgtgcgaggagcagtacggcagcacgtaccgttgcgtcagcgtcctcaccgtcctgcaccaggactggctgaatggcaaggagtacaagtgcaaggtgtccaacaaagccctcccagcccccatcgagaaaaccatctccaaagccaaagggcagccccgagaaccacaggtgtacaccctgcccccatcccgggaggagatgaccaagaaccaggtcagcctgacctgcctggtcaaaggcttctatcccagcgacatcgccgtggagtgggagagcaatgggcagccggagaacaactacaagaccacgcctcccgtgctggactccgacggctccttcttcctctatagcaagctcaccgtggacaagagcaggtggcagcaggggaacgtcttctcatgctccgtgatgcatgaggctctgcacaaccactacacgcagaagagcctctccctgtctccgggcaaa

SEQ ID NO: 353 - DNA, 1404 bp, synthetic construct
  misc_feature 1..1404: note = Description of Artificial Sequence: Synthetic polynucleotide
  misc_feature 1..1404: note = NA sequence HC SST204812
  source 1..1404: mol_type = other DNA
atggacatgagggtgcccgctcagctcctggggctcctgctgctgtggctgagaggtgcgcgctgtgaggtgcagctgttggagtctgggggaggcttggtacagcctggggggtccctgagactctcctgtgcagcctctggattcacctttagcagctatgccatgagctgggtccgccaggctccagggaagggactggagtgggtgtcagctattagtggtagtggtggtagcacatactacgcagaatccgtgaagggccggttcaccatctccagagacaattccaagaacacgctgtatctgcaaatgaacagcctgagagccgaggacacggccgtatattactgtgcgaaggcgtatacacctatggcattctttgactactggggccagggaaccctggtcaccgtgtcctcagcctccaccaagggcccatcggtcttccccctggcgcccagctccaggagcacctccgagagcacagcggccctgggctgcctggtcaaggactacttccccgaaccggtgacggtgtcgtggaactcaggcgctctgaccagcggcgtgcacaccttcccagctgtcctacagtcctcaggactctactccctcagcagcgtggtgaccgtgccctccagcaacttcggcacccagacctacacctgcaacgtagatcacaagcccagcaacaccaaggtggacaagacagttgagcgcaaatgttgtgtcgagtgcccaccgtgcccagcacctgaactcctggggggaccgtcagtcttcctcttccccccaaaacccaaggacaccctcatgatctcccggacccctgaggtcacatgcgtggtggtggacgtgagccacgaagaccctgaggtcaagttcaactggtacgtggacggcgtggaggtgcataatgccaagacaaagccgtgcgaggagcagtacggcagcacgtaccgttgcgtcagcgtcctcaccgtcctgcaccaggactggctgaatggcaaggagtacaagtgcaaggtgtccaacaaagccctcccagcccccatcgagaaaaccatctccaaagccaaagggcagccccgagaaccacaggtgtacaccctgcccccatcccgggaggagatgaccaagaaccaggtcagcctgacctgcctggtcaaaggcttctatcccagcgacatcgccgtggagtgggagagcaatgggcagccggagaacaactacaagaccacgcctcccgtgctggactccgacggctccttcttcctctatagcaagctcaccgtggacaagagcaggtggcagcaggggaacgtcttctcatgctccgtgatgcatgaggctctgcacaaccactacacgcagaagagcctctccctgtctccgggcaaa

SEQ ID NO: 354 - DNA, 708 bp, synthetic construct
  misc_feature 1..708: note = Description of Artificial Sequence: Synthetic polynucleotide
  misc_feature 1..708: note = NA sequence LC SST29857
  source 1..708: mol_type = other DNA
atggacatgagggtgcccgctcagctcctggggctcctgctgctgtggctgagaggtgcgcgctgtgacatccagatgacccagtctccatcttccgtgtctgcatctgtaggagacagagtcaccatcacttgtcgggcgagtcagggtattagcagctggttagcctggtatcagcagaaaccagggaaagcccctaagctcctgatctatgctgcatccagtttgcaaagtggggtcccatcaaggttcagcggcagtggatctgggacagatttcactctcaccatcagcagcctgcagcctgaagattttgcaacttacttttgtcaacaggctgacgctttccctcgcacttttggccaggggaccaagctggagatcaaacgaacggtggctgcaccatctgtcttcatcttcccgccatctgatgagcagttgaaatctggaactgcctctgttgtgtgcctgctgaataacttctatcccagagaggccaaagtacagtggaaggtggataacgccctccaatcgggtaactcccaggagagtgtcacagagcaggacagcaaggacagcacctacagcctcagcagcaccctgacgctgagcaaagcagactacgagaaacacaaagtctacgcctgcgaagtcacccatcagggcctgagctcgcccgtcacaaagagcttcaacaggggagagtgt

SEQ ID NO: 355 - DNA, 1416 bp, synthetic construct
  misc_feature 1..1416: note = Description of Artificial Sequence: Synthetic polynucleotide
  misc_feature 1..1416: note = NA sequence HC SST29857
  source 1..1416: mol_type = other DNA
atggacatgagggtgcccgctcagctcctggggctcctgctgctgtggctgagaggtgcgcgctgtgaggtgcagctggtgcagtctggagcagaggtgaaaaagcccggggagtctctgaagatctcctgtaagggttctggatacagttttaccagctactggatcgcctgggtgcgccagatgcccgggaaaggcctggagtggatggggatcatctatcctggtgacgctgatgccagatacagcccgtccttccaaggccaggtcaccatctcagccgacaagtccatcagcaccgcctacctacagtggagcagcctgaaggcctcggacaccgccatgtatttctgtgcgagacaaaggacgttttattatgatagtagtgattattttgactactggggccagggaaccctggtcaccgtgtcctcagcctccaccaagggcccatcggtcttccccctggcgcccagctccaggagcacctccgagagcacagcggccctgggctgcctggtcaaggactacttccccgaaccggtgacggtgtcgtggaactcaggcgctctgaccagcggcgtgcacaccttcccagctgtcctacagtcctcaggactctactccctcagcagcgtggtgaccgtgccctccagcaacttcggcacccagacctacacctgcaacgtagatcacaagcccagcaacaccaaggtggacaagacagttgagcgcaaatgttgtgtcgagtgcccaccgtgcccagcacctgaactcctggggggaccgtcagtcttcctcttccccccaaaacccaaggacaccctcatgatctcccggacccctgaggtcacatgcgtggtggtggacgtgagccacgaagaccctgaggtcaagttcaactggtacgtggacggcgtggaggtgcataatgccaagacaaagccgtgcgaggagcagtacggcagcacgtaccgttgcgtcagcgtcctcaccgtcctgcaccaggactggctgaatggcaaggagtacaagtgcaaggtgtccaacaaagccctcccagcccccatcgagaaaaccatctccaaagccaaagggcagccccgagaaccacaggtgtacaccctgcccccatcccgggaggagatgaccaagaaccaggtcagcctgacctgcctggtcaaaggcttctatcccagcgacatcgccgtggagtgggagagcaatgggcagccggagaacaactacaagaccacgcctcccgtgctggactccgacggctccttcttcctctatagcaagctcaccgtggacaagagcaggtggcagcaggggaacgtcttctcatgctccgtgatgcatgaggctctgcacaaccactacacgcagaagagcctctccctgtctccgggcaaa

SEQ ID NO: 356 - DNA, 708 bp, synthetic construct
  misc_feature 1..708: note = Description of Artificial Sequence: Synthetic polynucleotide
  misc_feature 1..708: note = NA sequence LC SST202443
  source 1..708: mol_type = other DNA
atggacatgagggtgcccgctcagctcctggggctcctgctgctgtggctgagaggtgcgcgctgtgaaatagtgatgacgcagtctccagccaccctgtctgtgtctccaggggaaagagccaccctctcctgcagggccagtcagagtgttagcagcaacttagcctggttccagcagaaacctggccaggctcccaggctcctcatctatggtgcttccaccagggccactggtattccagccaggttcagtggcagtgggtctgggacagagttcactctcaccatcagcagcctgcagcctgaagattttgcagtttattactgtctgcaggataataatttccctcccactttcggccaagggaccaaagtggatatcaaacgaacggtggctgcaccatctgtcttcatcttcccgccatctgatgagcagttgaaatctggaactgcctctgttgtgtgcctgctgaataacttctatcccagagaggccaaagtacagtggaaggtggataacgccctccaatcgggtaactcccaggagagtgtcacagagcaggacagcaaggacagcacctacagcctcagcagcaccctgacgctgagcaaagcagactacgagaaacacaaagtctacgcctgcgaagtcacccatcagggcctgagctcgcccgtcacaaagagcttcaacaggggagagtgt

SEQ ID NO: 357 - DNA, 1419 bp, synthetic construct
  misc_feature 1..1419: note = Description of Artificial Sequence: Synthetic polynucleotide
  misc_feature 1..1419: note = NA sequence HC SST202443
  source 1..1419: mol_type = other DNA
atggacatgagggtgcccgctcagctcctggggctcctgctgctgtggctgagaggtgcgcgctgtgaggtgcagctggtgcagtctggagcagaggtgaaaaagcccggggagtctctgaagatctcctgtaagggttctggatacagctttaccagctactggatcggctgggtgcgccagatgcccgggaaaggcctggagtggatggggatcatctatcctggagatgctgatgccagatacagcccgtccttccaaggccaggtcaccatctcagccgacaagtccatcagcaccgcctacctgcagtggagcagcctgaaggcctcggacaccgccatgtatttctgtgcgaggcggagacaggggatcttcggtgatgctcttgatttctggggccaagggacattggtcaccgtgtcttcagcctccaccaagggcccatcggtcttccccctggcaccctcctccaagagcacctctgggggcacagcggccctgggctgcctggtcaaggactacttccccgaaccggtgacggtgtcgtggaactcaggcgccctgaccagcggcgtgcacaccttcccggctgtcctacagtcctcaggactctactccctcagcagcgtggtgaccgtgccctccagcagcttgggcacccagacctacatctgcaacgtgaatcacaagcccagcaacaccaaggtggacaagaaagttgagcccaaatcttgtgacaaaactcacacatgcccaccgtgcccagcacctgaactcctggggggaccgtcagtcttcctcttccccccaaaacccaaggacaccctcatgatctcccggacccctgaggtcacatgcgtggtggtggacgtgagccacgaagaccctgaggtcaagttcaactggtacgtggacggcgtggaggtgcataatgccaagacaaagccgtgcgaggagcagtacggcagcacgtaccgttgcgtcagcgtcctcaccgtcctgcaccaggactggctgaatggcaaggagtacaagtgcaaggtgtccaacaaagccctcccagcccccatcgagaaaaccatctccaaagccaaagggcagccccgagaaccacaggtgtacaccctgcccccatcccgggaggagatgaccaagaaccaggtcagcctgacctgcctggtcaaaggcttctatcccagcgacatcgccgtggagtgggagagcaatgggcagccggagaacaactacaagaccacgcctcccgtgctggactccgacggctccttcttcctctatagcaagctcaccgtggacaagagcaggtggcagcaggggaacgtcttctcatgctccgtgatgcatgaggctctgcacaaccactacacgcagaagagcctctccctgtctccgggcaaa

SEQ ID NO: 358 - DNA, 708 bp, synthetic construct
  misc_feature 1..708: note = Description of Artificial Sequence: Synthetic polynucleotide
  misc_feature 1..708: note = NA sequence LC SST29825
  source 1..708: mol_type = other DNA
atggacatgagggtgcccgctcagctcctggggctcctgctgctgtggctgagaggtgcgcgctgtgacatccagatgacccagtctccatcctcactgtctgcatctgtaggagacagagtcaccatcacttgtcgggcgagtcagggcattagcaattatttagcctggtatcagcagaaaccagggaaagcccctaaatccctgatctatgctgcatccagtttgcaaagtggggtcccatcaaggttcagcggcagtggatctgggacagatttcactctcaccatcagcagcctgcagcctgaagattttgcaacttattactgccaacagtatagtacttacccattcactttcggccaagggaccaaagtggatatcaaacgaacggtggctgcaccatctgtcttcatcttcccgccatctgatgagcagttgaaatctggaactgcctctgttgtgtgcctgctgaataacttctatcccagagaggccaaagtacagtggaaggtggataacgccctccaatcgggtaactcccaggagagtgtcacagagcaggacagcaaggacagcacctacagcctcagcagcaccctgacgctgagcaaagcagactacgagaaacacaaagtctacgcctgcgaagtcacccatcagggcctgagctcgcccgtcacaaagagcttcaacaggggagagtgt

SEQ ID NO: 359 - DNA, 1410 bp, synthetic construct
  misc_feature 1..1410: note = Description of Artificial Sequence: Synthetic polynucleotide
  misc_feature 1..1410: note = NA sequence HC SST29825
  source 1..1410: mol_type = other DNA
atggacatgagggtgcccgctcagctcctggggctcctgctgctgtggctgagaggtgcgcgctgtcaggtgcagctggtgcagtctggggctgaggtgaagaagcctggggcctcagtgaaggtgtcctgcaaggcttctggatacaccttcaccggctactatatccactgggtgcgacaggcccctggacaagggcttgagtggatgggatggatcaacccttacagtggtggcacaacctctgcacagaagtttcagggcagggtcaccatgaccagggacacgtccaccagctcagcctacatggaactgagcaggctgagatctgacgacacggccgtgtattactgtgcgagagatgcaggctacctggccctctacggtacggacgtctggggccaagggaccttggtcaccgtgtcctcagcctccaccaagggcccatcggtcttccccctggcgcccagctccaggagcacctccgagagcacagcggccctgggctgcctggtcaaggactacttccccgaaccggtgacggtgtcgtggaactcaggcgctctgaccagcggcgtgcacaccttcccagctgtcctacagtcctcaggactctactccctcagcagcgtggtgaccgtgccctccagcaacttcggcacccagacctacacctgcaacgtagatcacaagcccagcaacaccaaggtggacaagacagttgagcgcaaatgttgtgtcgagtgcccaccgtgcccagcacctgaactcctggggggaccgtcagtcttcctcttccccccaaaacccaaggacaccctcatgatctcccggacccctgaggtcacatgcgtggtggtggacgtgagccacgaagaccctgaggtcaagttcaactggtacgtggacggcgtggaggtgcataatgccaagacaaagccgtgcgaggagcagtacggcagcacgtaccgttgcgtcagcgtcctcaccgtcctgcaccaggactggctgaatggcaaggagtacaagtgcaaggtgtccaacaaagccctcccagcccccatcgagaaaaccatctccaaagccaaagggcagccccgagaaccacaggtgtacaccctgcccccatcccgggaggagatgaccaagaaccaggtcagcctgacctgcctggtcaaaggcttctatcccagcgacatcgccgtggagtgggagagcaatgggcagccggagaacaactacaagaccacgcctcccgtgctggactccgacggctccttcttcctctatagcaagctcaccgtggacaagagcaggtggcagcaggggaacgtcttctcatgctccgtgatgcatgaggctctgcacaaccactacacgcagaagagcctctccctgtctccgggcaaa

SEQ ID NO: 360 - protein, 10 aa, synthetic construct
  REGION 1..10: note = Description of Artificial Sequence: Synthetic peptide
  REGION 1..10: note = Peptides from epitope mapping experiments
HRDAGDLWFP

SEQ ID NO: 361 - protein, 9 aa, synthetic construct
  REGION 1..9: note = Description of Artificial Sequence: Synthetic peptide
  REGION 1..9: note = Peptides from epitope mapping experiments
AGDLWFPGE

SEQ ID NO: 362 - protein, 10 aa, synthetic construct
  REGION 1..10: note = Description of Artificial Sequence: Synthetic peptide
  REGION 1..10: note = Peptides from epitope mapping experiments
GDLWFPGESE

SEQ ID NO: 363 - protein, 14 aa, synthetic construct
  REGION 1..14: note = Description of Artificial Sequence: Synthetic peptide
  REGION 1..14: note = Peptides from epitope mapping experiments
HRDAGDLWFPGESE

SEQ ID NO: 364 - protein, 17 aa, synthetic construct
  REGION 1..17: note = Description of Artificial Sequence: Synthetic peptide
  REGION 1..17: note = Peptides from epitope mapping experiments
PLDHRDAGDLWFPGESE

SEQ ID NO: 365 - protein, 17 aa, synthetic construct
  REGION 1..17: note = Description of Artificial Sequence: Synthetic peptide
  REGION 1..17: note = Peptides from epitope mapping experiments
PLDHRDAGDAWFPGESE

SEQ ID NO: 366 - protein, 17 aa, synthetic construct
  REGION 1..17: note = Description of Artificial Sequence: Synthetic peptide
  REGION 1..17: note = Peptides from epitope mapping experiments
PLDHRDAGDLWAPGESE

SEQ ID NO: 367 - protein, 6 aa, synthetic construct
  REGION 1..6: note = Description of Artificial Sequence: Synthetic peptide
  REGION 1..6: note = Peptides from epitope mapping experiments
GDLWFP

SEQ ID NO: 368 - protein, 17 aa, synthetic construct
  REGION 1..17: note = Description of Artificial Sequence: Synthetic peptide
  REGION 1..17: note = CDRH2 Antibody ID 24G6 SST28 Variant
AISGSGGSTYYAESVKG

SEQ ID NO: 369 - protein, 7 aa, synthetic construct
  REGION 1..7: note = Description of Artificial Sequence: Synthetic peptide
  REGION 1..7: note = CDRL2 Antibody ID 6E7 SST29 Variant
AASSLQS

SEQ ID NO: 370 - protein, 9 aa, synthetic construct
  REGION 1..9: note = Description of Artificial Sequence: Synthetic peptide
  REGION 1..9: note = CDRL3 Antibody ID 6E7 SST29 Variant
QQADAFPRT

SEQ ID NO: 371 - protein, 17 aa, synthetic construct
  REGION 1..17: note = Description of Artificial Sequence: Synthetic peptide
  REGION 1..17: note = CDRH2 Antibody ID 6E7 SST29 Variant
IIYPGDADARYSPSFQG

SEQ ID NO: 372 - protein, 9 aa, synthetic construct
  REGION 1..9: note = Description of Artificial Sequence: Synthetic peptide
  REGION 1..9: note = CDRL3 Antibody ID 13E7 SST20 Variant
LQDNNFPPT

SEQ ID NO: 373 - protein, 17 aa, synthetic construct
  REGION 1..17: note = Description of Artificial Sequence: Synthetic peptide
  REGION 1..17: note = CDRH2 Antibody ID 13E7 SST20 Variant
IIYPGDADARYSPSFQG

SEQ ID NO: 374 - protein, 12 aa, synthetic construct
  REGION 1..12: note = Description of Artificial Sequence: Synthetic peptide
  REGION 1..12: note = CDRH3 Antibody ID 13E7 SST20 Variant
RRQGIFGDALDF

SEQ ID NO: 375 - protein, 12 aa, synthetic construct
  REGION 1..12: note = Description of Artificial Sequence: Synthetic peptide
  REGION 1..12: note = CDRH3 Antibody ID 5E3 SST29 Variant
DAGYLALYGTDV

SEQ ID NO: 376 - protein, 113 aa, Homo sapiens; identical to SEQ ID NO: 3

SEQ ID NO: 377 - protein, 9 aa, synthetic construct
  REGION 1..9: note = Description of Artificial Sequence: Synthetic peptide
  REGION 1..9: note = Synthetic Construct
FTFSSYAMS

SEQ ID NO: 378 - protein, 9 aa, synthetic construct
  REGION 1..9: note = Description of Artificial Sequence: Synthetic peptide
  REGION 1..9: note = Synthetic Construct
FTFSSSAMS

SEQ ID NO: 379 - protein, 9 aa, synthetic construct
  REGION 1..9: note = Description of Artificial Sequence: Synthetic peptide
  REGION 1..9: note = Synthetic Construct
GTFSSYAIS

SEQ ID NO: 380 - protein, 9 aa, synthetic construct
  REGION 1..9: note = Description of Artificial Sequence: Synthetic peptide
  REGION 1..9: note = Synthetic Construct
YTFTSYYIH

SEQ ID NO: 381 - protein, 9 aa, synthetic construct
  REGION 1..9: note = Description of Artificial Sequence: Synthetic peptide
  REGION 1..9: note = Synthetic Construct
YTFTSYYMH

SEQ ID NO: 382 - protein, 11 aa, synthetic construct
  REGION 1..11: note = Description of Artificial Sequence: Synthetic peptide
  REGION 1..11: note = Synthetic Construct
GSISSSSYYWG

SEQ ID NO: 383 - protein, 9 aa, synthetic construct
  REGION 1..9: note = Description of Artificial Sequence: Synthetic peptide
  REGION 1..9: note = Synthetic Construct
YSFTSYWIG

SEQ ID NO: 384 - protein, 9 aa, synthetic construct
  REGION 1..9: note = Description of Artificial Sequence: Synthetic peptide
  REGION 1..9: note = Synthetic Construct
YSFTSNWIG

SEQ ID NO: 385 - protein, 9 aa, synthetic construct
  REGION 1..9: note = Description of Artificial Sequence: Synthetic peptide
  REGION 1..9: note = Synthetic Construct
YSFTTYWIG

SEQ ID NO: 386 - protein, 9 aa, synthetic construct
  REGION 1..9: note = Description of Artificial Sequence: Synthetic peptide
  REGION 1..9: note = Synthetic Construct
YTFTSYGIS

SEQ ID NO: 387 - protein, 11 aa, synthetic construct
  REGION 1..11: note = Description of Artificial Sequence: Synthetic peptide
  REGION 1..11: note = Synthetic Construct
GSISSGGYYWS

SEQ ID NO: 388 - protein, 11 aa, synthetic construct
  REGION 1..11: note = Description of Artificial Sequence: Synthetic peptide
  REGION 1..11: note = Synthetic Construct
GSISSNSYYWG

SEQ ID NO: 389 - protein, 9 aa, synthetic construct
  REGION 1..9: note = Description of Artificial Sequence: Synthetic peptide
  REGION 1..9: note = Synthetic Construct
GSISSYYWS

SEQ ID NO: 390 - protein, 9 aa, synthetic construct
  REGION 1..9: note = Description of Artificial Sequence: Synthetic peptide
  REGION 1..9: note = Synthetic Construct
FTFSSYGMH

SEQ ID NO: 391 - protein, 9 aa, synthetic construct
  REGION 1..9: note = Description of Artificial Sequence: Synthetic peptide
  REGION 1..9: note = Synthetic Construct
FTFSTYGMH

SEQ ID NO: 392 - protein, 9 aa, synthetic construct
  REGION 1..9: note = Description of Artificial Sequence: Synthetic peptide
  REGION 1..9: note = Synthetic Construct
FTFSTYAMS

SEQ ID NO: 393 - protein, 9 aa, synthetic construct
  REGION 1..9: note = Description of Artificial Sequence: Synthetic peptide
  REGION 1..9: note = Synthetic Construct
YTFTGSYMH

SEQ ID NO: 394 - protein, 9 aa, synthetic construct
  REGION 1..9: note = Description of Artificial Sequence: Synthetic peptide
  REGION 1..9: note = Synthetic Construct
YTFTGYYMH

SEQ ID NO: 395 - protein, 9 aa, synthetic construct
  REGION 1..9: note = Description of Artificial Sequence: Synthetic peptide
  REGION 1..9: note = Synthetic Construct
YTFTNYGIS

SEQ ID NO: 396 - protein, 9 aa, synthetic construct
  REGION 1..9: note = Description of Artificial Sequence: Synthetic peptide
  REGION 1..9: note = Synthetic Construct
YTFTSYGIH

SEQ ID NO: 397 - protein, 9 aa, synthetic construct
  REGION 1..9: note = Description of Artificial Sequence: Synthetic peptide
  REGION 1..9: note = Synthetic Construct
FTFSSYSMN

SEQ ID NO: 398 - protein, 9 aa, synthetic construct
  REGION 1..9: note = Description of Artificial Sequence: Synthetic peptide
  REGION 1..9: note = Synthetic Construct
GSFSGYYWS

SEQ ID NO: 399 - protein, 17 aa, synthetic construct
  REGION 1..17: note = Description of Artificial Sequence: Synthetic peptide
  REGION 1..17: note = Synthetic Construct
VISGSGGSTYYADSVKG

SEQ ID NO: 400 - protein, 17 aa, synthetic construct
  REGION 1..17: note = Description of Artificial Sequence: Synthetic peptide
  REGION 1..17: note = Synthetic Construct
AISGSGGSTYYADSVKG

SEQ ID NO: 401 - protein, 17 aa, synthetic construct
  REGION 1..17: note = Description of Artificial Sequence: Synthetic peptide
  REGION 1..17: note = Synthetic Construct
GIIPIFGTANYAQKFQG

SEQ ID NO: 402 - protein, 17 aa, synthetic construct
  REGION 1..17: note = Description of Artificial Sequence: Synthetic peptide
  REGION 1..17: note = Synthetic Construct
GIIPIFGTASYAQKFQG

SEQ ID NO: 403 - protein, 17 aa, synthetic construct
  REGION 1..17: note = Description of Artificial Sequence: Synthetic peptide
  REGION 1..17: note = Synthetic Construct
IINPSGGSTSYAQKFQG

SEQ ID NO: 404 - protein, 17 aa, synthetic construct
  REGION 1..17: note = Description of Artificial Sequence: Synthetic peptide
  REGION 1..17: note = Synthetic Construct
IINPGGGSTSYAQKFQG

SEQ ID NO: 405 - protein, 17 aa, synthetic construct
  REGION 1..17: note = Description of Artificial Sequence: Synthetic peptide
  REGION 1..17: note = Synthetic Construct
IINPSGGSTTYAQKFQG

SEQ ID NO: 406 - protein, 16 aa, synthetic construct
  REGION 1..16: note = Description of Artificial Sequence: Synthetic peptide
  REGION 1..16: note = Synthetic Construct
SISYSGSTYYNPSLKS

SEQ ID NO: 407 - protein, 17 aa, synthetic construct
  REGION 1..17: note = Description of Artificial Sequence: Synthetic peptide
  REGION 1..17: note = Synthetic Construct
IIYPGDSDTTYSPSFQG

SEQ ID NO: 408 - protein, 17 aa, synthetic construct
  REGION 1..17: note = Description of Artificial Sequence: Synthetic peptide
  REGION 1..17: note = Synthetic Construct
IIYPGDSDTRYSPSFQG

SEQ ID NO: 409 - protein, 17 aa, synthetic construct
  REGION 1..17: note = Description of Artificial Sequence: Synthetic peptide
  REGION 1..17: note = Synthetic Construct
WISAYNGNTNYAQKLQG

SEQ ID NO: 410 - protein, 16 aa, synthetic construct
  REGION 1..16: note = Description of Artificial Sequence: Synthetic peptide
  REGION 1..16: note = Synthetic Construct
NIYYSGSTVYNPSLKS

SEQ ID NO: 411 - protein, 16 aa, synthetic construct
  REGION 1..16: note = Description of Artificial Sequence: Synthetic peptide
  REGION 1..16: note = Synthetic Construct
SIYYSGSTYYNPSLKS

SEQ ID NO: 412 - protein, 16 aa, synthetic construct
  REGION 1..16: note = Description of Artificial Sequence: Synthetic peptide
  REGION 1..16: note = Synthetic Construct
SIYYSGSTNYNPSLKS

SEQ ID NO: 413 - protein, 17 aa, synthetic construct
  REGION 1..17: note = Description of Artificial Sequence: Synthetic peptide
  REGION 1..17: note = Synthetic Construct
VISYDGSNKYYADSVKG

SEQ ID NO: 414 - protein, 17 aa, synthetic construct
  REGION 1..17: note = Description of Artificial Sequence: Synthetic peptide
  REGION 1..17: note = Synthetic Construct
LIWYDGSNKYYADSVKG

SEQ ID NO: 415 - protein, 17 aa, synthetic construct
  REGION 1..17: note = Description of Artificial Sequence: Synthetic peptide
  REGION 1..17: note = Synthetic Construct
VIWYDGSNKYYADSVKG

SEQ ID NO: 416 - protein, 17 aa, synthetic construct
  REGION 1..17: note = Description of Artificial Sequence: Synthetic peptide
  REGION 1..17: note = Synthetic Construct
WINPNSGGTNYAQKFQG

SEQ ID NO: 417 - protein, 17 aa, synthetic construct
  REGION 1..17: note = Description of Artificial Sequence: Synthetic peptide
  REGION 1..17: note = Synthetic Construct
SINPNSGGTNYAQKFQG

SEQ ID NO: 418 - protein, 17 aa, synthetic construct
  REGION 1..17: note = Description of Artificial Sequence: Synthetic peptide
  REGION 1..17: note = Synthetic Construct
WINPNSGGTSYAQKFQG

SEQ ID NO: 419 - protein, 17 aa, synthetic construct
  REGION 1..17: note = Description of Artificial Sequence: Synthetic peptide
  REGION 1..17: note = Synthetic Construct
WISTYNGNTNYAQKLQG

SEQ ID NO: 420 - protein, 17 aa, synthetic construct
  REGION 1..17: note = Description of Artificial Sequence: Synthetic peptide
  REGION 1..17: note = Synthetic Construct
SISSSSSYIYYADSVKG

SEQ ID NO: 421 - protein, 17 aa, synthetic construct
  REGION 1..17: note = Description of Artificial Sequence: Synthetic peptide
  REGION 1..17: note = Synthetic Construct
YISGSSSTIYYADSVKG

SEQ ID NO: 422 - protein, 16 aa, synthetic construct
  REGION 1..16: note = Description of Artificial Sequence: Synthetic peptide
  REGION 1..16: note = Synthetic Construct
YIYYSGSTVYNPSLKS

SEQ ID NO: 423 - protein, 16 aa, synthetic construct
  REGION 1..16: note = Description of Artificial Sequence: Synthetic peptide
  REGION 1..16: note = Synthetic Construct
EIDHSGSTKYNPSLKS

SEQ ID NO: 424 - protein, 11 aa, synthetic construct
  REGION 1..11: note = Description of Artificial Sequence: Synthetic peptide
  REGION 1..11: note = Synthetic Construct
AKGTPTLLFQH

SEQ ID NO: 425 - protein, 21 aa, synthetic construct
  REGION 1..21: note = Description of Artificial Sequence: Synthetic peptide
  REGION 1..21: note = Synthetic Construct
AKVPSYDYWSGYSNYYYYMDV

SEQ ID NO: 426 - protein, 11 aa, synthetic construct
  REGION 1..11: note = Description of Artificial Sequence: Synthetic peptide
  REGION 1..11: note = Synthetic Construct
AREQYHVGMDV

SEQ ID NO: 427 - protein, 10 aa, synthetic construct
  REGION 1..10: note = Description of Artificial Sequence: Synthetic peptide
  REGION 1..10: note = Synthetic Construct
ARGVDSIMDY

SEQ ID NO: 428 - protein, 13 aa, synthetic construct
  REGION 1..13: note = Description of Artificial Sequence: Synthetic peptide
  REGION 1..13: note = Synthetic Construct
ARAPQESPYVFDI

SEQ ID NO: 429 - protein, 13 aa, synthetic construct
  REGION 1..13: note = Description of Artificial Sequence: Synthetic peptide
  REGION 1..13: note = Synthetic Construct
ARGSPTYGYLYDP

SEQ ID NO: 430 - protein, 10 aa, synthetic construct
  REGION 1..10: note = Description of Artificial Sequence: Synthetic peptide
  REGION 1..10: note = Synthetic Construct
ARTSSKERDY

SEQ ID NO: 431 - protein, 13 aa, synthetic construct
  REGION 1..13: note = Description of Artificial Sequence: Synthetic peptide
  REGION 1..13: note = Synthetic Construct
ARGPYRLLLGMDV

SEQ ID NO: 432 - protein, 14 aa, synthetic construct
  REGION 1..14: note = Description of Artificial Sequence: Synthetic peptide
  REGION 1..14: note = Synthetic Construct
ARLHISGEVNWFDP

SEQ ID NO: 433 - protein, 15 aa, synthetic construct
  REGION 1..15: note = Description of Artificial Sequence: Synthetic peptide
  REGION 1..15: note = Synthetic Construct
AREAGYDYGELAFDI

SEQ ID NO: 434 - protein, 15 aa, synthetic construct
  REGION 1..15: note = Description of Artificial Sequence: Synthetic peptide
  REGION 1..15: note = Synthetic Construct
ARAGHYDGGHLGMDV

SEQ ID NO: 435 - protein, 17 aa, synthetic construct
  REGION 1..17: note = Description of Artificial Sequence: Synthetic peptide
  REGION 1..17: note = Synthetic Construct
ARLGHYSGTVSSYGMDV

SEQ ID NO: 436 - protein, 11 aa, synthetic construct
  REGION 1..11: note = Description of Artificial Sequence: Synthetic peptide
  REGION 1..11: note = Synthetic Construct
ARGPSHYYDLA

SEQ ID NO: 437 - protein, 12 aa, synthetic construct
  REGION 1..12: note = Description of Artificial Sequence: Synthetic peptide
  REGION 1..12: note = Synthetic Construct
ARGLYGYGVLDV

SEQ ID NO: 438 - protein, 12 aa, synthetic construct
  REGION 1..12: note = Description of Artificial Sequence: Synthetic peptide
  REGION 1..12: note = Synthetic Construct
ARGVLGYGVFDY

SEQ ID NO: 439 - protein, 16 aa, synthetic construct
  REGION 1..16: note = Description of Artificial Sequence: Synthetic peptide
  REGION 1..16: note = Synthetic Construct
ARDGGGEYPSGTPFDI

SEQ ID NO: 440 - protein, 11 aa, synthetic construct
  REGION 1..11: note = Description of Artificial Sequence: Synthetic peptide
  REGION 1..11: note = Synthetic Construct
ARSGMASFFDY

SEQ ID NO: 441 - protein, 10 aa, synthetic construct
  REGION 1..10: note = Description of Artificial Sequence: Synthetic peptide
  REGION 1..10: note = Synthetic Construct
AKLGGHSMDV

SEQ ID NO: 442 - protein, 11 aa, synthetic construct
  REGION 1..11: note = Description of Artificial Sequence: Synthetic peptide
  REGION 1..11: note = Synthetic Construct
AKPLKRGRGFY

SEQ ID NO: 443 - protein, 10 aa, synthetic construct
  REGION 1..10: note = Description of Artificial Sequence: Synthetic peptide
  REGION 1..10: note = Synthetic Construct
AKEGRTITMD

SEQ ID NO: 444 - protein, 10 aa, synthetic construct
  REGION 1..10: note = Description of Artificial Sequence: Synthetic peptide
  REGION 1..10: note = Synthetic Construct
AKDQYSVLDY

SEQ ID NO: 445 - protein, 13 aa, synthetic construct
  REGION 1..13: note = Description of Artificial Sequence: Synthetic peptide
  REGION 1..13: note = Synthetic Construct
AKKYSSRGVYFDY

SEQ ID NO: 446 - protein, 17 aa, synthetic construct
  REGION 1..17: note = Description of Artificial Sequence: Synthetic peptide
  REGION 1..17: note = Synthetic Construct
ARLGGAVGARHVTYFDY

SEQ ID NO: 447 - protein, 14 aa, synthetic construct
  REGION 1..14: note = Description of Artificial Sequence: Synthetic peptide
  REGION 1..14: note = Synthetic Construct
ARGQYYGGSGWFDP

SEQ ID NO: 448 - protein, 12 aa, synthetic construct
  REGION 1..12: note = Description of Artificial Sequence: Synthetic peptide
  REGION 1..12: note = Synthetic Construct
ARLGQEYAYFQH

SEQ ID NO: 449 - protein, 14 aa, synthetic construct
  REGION 1..14: note = Description of Artificial Sequence: Synthetic peptide
  REGION 1..14: note = Synthetic Construct
ARRRDGYYDEVFDI

SEQ ID NO: 450 - protein, 12 aa, synthetic construct
  REGION 1..12: note = Description of Artificial Sequence: Synthetic peptide
  REGION 1..12: note = Synthetic Construct
ARVPKHYVVLDY

SEQ ID NO: 451 - protein, 10 aa, synthetic construct
  REGION 1..10: note = Description of Artificial Sequence: Synthetic peptide
  REGION 1..10: note = Synthetic Construct
ARAGGHLFDY

SEQ ID NO: 452 - protein, 15 aa, synthetic construct
  REGION 1..15: note = Description of Artificial Sequence: Synthetic peptide
  REGION 1..15: note = Synthetic Construct
ARDRGGEYVDFAFDI

SEQ ID NO: 453 - protein, 15 aa, synthetic construct
  REGION 1..15: note = Description of Artificial Sequence: Synthetic peptide
  REGION 1..15: note = Synthetic Construct
ARTRSGYGASNYFDY

SEQ ID NO: 454 - protein, 15 aa, synthetic construct
  REGION 1..15: note = Description of Artificial Sequence: Synthetic peptide
  REGION 1..15: note = Synthetic Construct
ARGTGAAAASPAFDI

SEQ ID NO: 455 - protein, 12 aa, synthetic construct
  REGION 1..12: note = Description of Artificial Sequence: Synthetic peptide
  REGION 1..12: note = Synthetic Construct
ARVGQYMLGMDV

SEQ ID NO: 456 - protein, 18 aa, synthetic construct
  REGION 1..18: note = Description of Artificial Sequence: Synthetic peptide
  REGION 1..18: note = Synthetic Construct
ARGAPVDYGGIEPEYFQH

SEQ ID NO: 457 - protein, 12 aa, synthetic construct
  REGION 1..12: note = Description of Artificial Sequence: Synthetic peptide
  REGION 1..12: note = Synthetic Construct
AKHYHVGIAFDI

SEQ ID NO: 458 - protein, 13 aa, synthetic construct
  REGION 1..13: note = Description of Artificial Sequence: Synthetic peptide
  REGION 1..13: note = Synthetic Construct
ARAMARKSVAFDI

SEQ ID NO: 459 - protein, 14 aa, synthetic construct
  REGION 1..14: note = Description of Artificial Sequence: Synthetic peptide
  REGION 1..14: note = Synthetic Construct
AKVPSYQRGTAFDP

SEQ ID NO: 460 - protein, 14 aa, synthetic construct
  REGION 1..14: note = Description of Artificial Sequence: Synthetic peptide
  REGION 1..14: note = Synthetic Construct
AKSPAVAGIYRADY

SEQ ID NO: 461 - protein, 17 aa, synthetic construct
  REGION 1..17: note = Description of Artificial Sequence: Synthetic peptide
  REGION 1..17: note = Synthetic Construct
ARGPGYTTALDYYYMDV

SEQ ID NO: 462 - protein, 9 aa, synthetic construct
  REGION 1..9: note = Description of Artificial Sequence: Synthetic peptide
  REGION 1..9: note = Synthetic Construct
ARPAKTADY

SEQ ID NO: 463 - protein, 9 aa, synthetic construct
  REGION 1..9: note = Description of Artificial Sequence: Synthetic peptide
  REGION 1..9: note = Synthetic Construct
ARPGKSMDV

SEQ ID NO: 464 - protein, 14 aa, synthetic construct
  REGION 1..14: note = Description of Artificial Sequence: Synthetic peptide
  REGION 1..14: note = Synthetic Construct
ARGVGGQDYYYMDV

SEQ ID NO: 465 - protein, 13 aa, synthetic construct
  REGION 1..13: note = Description of Artificial Sequence: Synthetic peptide
  REGION 1..13: note = Synthetic Construct
ARGPLYHPMIFDY

SEQ ID NO: 466 - protein, 8 aa, synthetic construct
  REGION 1..8: note = Description of Artificial Sequence: Synthetic peptide
  REGION 1..8: note = Synthetic Construct
ARASSVDN

SEQ ID NO: 467 - protein, 19 aa, synthetic construct
  REGION 1..19: note = Description of Artificial Sequence: Synthetic peptide
  REGION 1..19: note = Synthetic Construct
ARGPTKAYYGSGSYVVFDP

SEQ ID NO: 468 - protein, 15 aa, synthetic construct
  REGION 1..15: note = Description of Artificial Sequence: Synthetic peptide
  REGION 1..15: note = Synthetic Construct
ARLGIYSTGATAFDI

SEQ ID NO: 469 - protein, 12 aa, synthetic construct
  REGION 1..12: note = Description of Artificial Sequence: Synthetic peptide
  REGION 1..12: note = Synthetic Construct
ARGGVWYSLFDI

SEQ ID NO: 470 - protein, 9 aa, synthetic construct
  REGION 1..9: note = Description of Artificial Sequence: Synthetic peptide
  REGION 1..9: note = Synthetic Construct
ARASKMGDD

SEQ ID NO: 471 - protein, 13 aa, synthetic construct
  REGION 1..13: note = Description of Artificial Sequence: Synthetic peptide
  REGION 1..13: note = Synthetic Construct
ARGGVPRVSYFQH

SEQ ID NO: 472 - protein, 16 aa, synthetic construct
  REGION 1..16: note = Description of Artificial Sequence: Synthetic peptide
  REGION 1..16: note = Synthetic Construct
ARAGHYDDWSGLGLDV

SEQ ID NO: 473 - protein, 13 aa, synthetic construct
  REGION 1..13: note = Description of Artificial Sequence: Synthetic peptide
  REGION 1..13: note = Synthetic Construct
ARGSGSGYDSWYD

SEQ ID NO: 474 - protein, 15 aa, synthetic construct
  REGION 1..15: note = Description of Artificial Sequence: Synthetic peptide
  REGION 1..15: note = Synthetic Construct
ARLGRWSSGSTAFDI

SEQ ID NO: 475 - protein, 15 aa, synthetic construct
  REGION 1..15: note = Description of Artificial Sequence: Synthetic peptide
  REGION 1..15: note = Synthetic Construct
ARLGRKPSGSVAFDI

SEQ ID NO: 476 - protein, 10 aa, synthetic construct
  REGION 1..10: note = Description of Artificial Sequence: Synthetic peptide
  REGION 1..10: note = Synthetic Construct
ARAGHKTHDY

SEQ ID NO: 477 - protein, 9 aa, synthetic construct
  REGION 1..9: note = Description of Artificial Sequence: Synthetic peptide
  REGION 1..9: note = Synthetic Construct
AKPGSMTDY

SEQ ID NO: 478 - protein, 10 aa, synthetic construct
  REGION 1..10: note = Description of Artificial Sequence: Synthetic peptide
  REGION 1..10: note = Synthetic Construct
ARAKSVDHDY

SEQ ID NO: 479 - protein, 15 aa, synthetic construct
  REGION 1..15: note = Description of Artificial Sequence: Synthetic peptide
  REGION 1..15: note = Synthetic Construct
ARDISTHDYDLAFDI

SEQ ID NO: 480 - protein, 11 aa, synthetic construct
  REGION 1..11: note = Description of Artificial Sequence: Synthetic peptide
  REGION 1..11: note = Synthetic Construct
ARSGTETLFDY

SEQ ID NO: 481 - protein, 14 aa, synthetic construct
  REGION 1..14: note = Description of Artificial Sequence: Synthetic peptide
  REGION 1..14: note = Synthetic Construct
ARAKMLDDGYAFDI

SEQ ID NO: 482 - protein, 14 aa, synthetic construct
  REGION 1..14: note = Description of Artificial Sequence: Synthetic peptide
  REGION 1..14: note = Synthetic Construct
ARDLGYSSLLALDI

SEQ ID NO: 483 - protein, 15 aa, synthetic construct
  REGION 1..15: note = Description of Artificial Sequence: Synthetic peptide
  REGION 1..15: note = Synthetic Construct
ARGGGRRGDNNWFDP

SEQ ID NO: 484 - protein, 10 aa, synthetic construct
  REGION 1..10: note = Description of Artificial Sequence: Synthetic peptide
  REGION 1..10: note = Synthetic Construct
ARGPPHEMDY

SEQ ID NO: 485 - protein, 12 aa, synthetic construct
  REGION 1..12: note = Description of Artificial Sequence: Synthetic peptide
  REGION 1..12: note = Synthetic Construct
ARTPYPWIYFDL

SEQ ID NO: 486 - protein, 13 aa, synthetic construct
  REGION 1..13: note = Description of Artificial Sequence: Synthetic peptide
  REGION 1..13: note = Synthetic Construct
ARGGRRHYGGMDV

SEQ ID NO: 487 - protein, 15 aa, synthetic construct
  REGION 1..15: note = Description of Artificial Sequence: Synthetic peptide
  REGION 1..15: note = Synthetic Construct
ARGGGTFWSGSWALY

SEQ ID NO: 488 - protein, 16 aa, synthetic construct
  REGION 1..16: note = Description of Artificial Sequence: Synthetic peptide
  REGION 1..16: note = Synthetic Construct
ARDSGNYDYWSGALRY

SEQ ID NO: 489 - protein, 10 aa, synthetic construct
  REGION 1..10: note = Description of Artificial Sequence: Synthetic peptide
  REGION 1..10: note = Synthetic Construct
ARVSSSWYKA

SEQ ID NO: 490 - protein, 17 aa, synthetic construct
  REGION 1..17: note = Description of Artificial Sequence: Synthetic peptide
  REGION 1..17: note = Synthetic Construct
ARVGVVVGRPGYSAFDI

SEQ ID NO: 491 - protein, 17 aa, synthetic construct
  REGION 1..17: note = Description of Artificial Sequence: Synthetic peptide
  REGION 1..17: note = Synthetic Construct
AKDLGGYYGGAAYGMDV

SEQ ID NO: 492 - protein, 15 aa, synthetic construct
  REGION 1..15: note = Description of Artificial Sequence: Synthetic peptide
  REGION 1..15: note = Synthetic Construct
AKDGVYYGLGNWFDP

SEQ ID NO: 493 - protein, 13 aa, synthetic construct
  REGION 1..13: note = Description of Artificial Sequence: Synthetic peptide
  REGION 1..13: note = Synthetic Construct
ARHGWDRVGWFDP

SEQ ID NO: 494 - protein, 11 aa, synthetic construct
  REGION 1..11: note = Description of Artificial Sequence: Synthetic peptide
  REGION 1..11: note = Synthetic Construct
RASQSVSSNLA

SEQ ID NO: 495 - protein, 11 aa, synthetic construct
  REGION 1..11: note = Description of Artificial Sequence: Synthetic peptide
  REGION 1..11: note = Synthetic Construct
RASQSVGSNLA

SEQ ID NO: 496 - protein, 11 aa, synthetic construct
  REGION 1..11: note = Description of Artificial Sequence: Synthetic peptide
  REGION 1..11: note = Synthetic Construct
QASQDISNYLN

SEQ ID NO: 497 - protein, 12 aa, synthetic construct
  REGION 1..12: note = Description of Artificial Sequence: Synthetic peptide
  REGION 1..12: note = Synthetic Construct
RASQSVSSSYLA

SEQ ID NO: 498 - protein, 11 aa, synthetic construct
  REGION 1..11: note = Description of Artificial Sequence: Synthetic peptide
  REGION 1..11: note = Synthetic Construct
RASQSVSSYLA

SEQ ID NO: 499 - protein, 11 aa, synthetic construct
  REGION 1..11: note = Description of Artificial Sequence: Synthetic peptide
  REGION 1..11: note = Synthetic Construct
RASQSISSYLN

SEQ ID NO: 500 - protein, 12 aa, synthetic construct
  REGION 1..12: note = Description of Artificial Sequence: Synthetic peptide
  REGION 1..12: note = Synthetic Construct
RASQSVSSDYLA

SEQ ID NO: 501 - protein, 17 aa, synthetic construct
  REGION 1..17: note = Description of Artificial Sequence: Synthetic peptide
  REGION 1..17: note = Synthetic Construct
KSSQSVLYSSNNKNYLA

SEQ ID NO: 502 - protein, 11 aa, synthetic construct
  REGION 1..11: note = Description of Artificial Sequence: Synthetic peptide
  REGION 1..11: note = Synthetic Construct
QASQDISNFLN

SEQ ID NO: 503 - protein, 11 aa, synthetic construct
  REGION 1..11: note = Description of Artificial Sequence: Synthetic peptide
  REGION 1..11: note = Synthetic Construct
RASQSISRYLN

SEQ ID NO: 504 - protein, 11 aa, synthetic construct
  REGION 1..11: note = Description of Artificial Sequence: Synthetic peptide
  REGION 1..11: note = Synthetic Construct
RASQSINSYLN

SEQ ID NO: 505 - protein, 11 aa, synthetic construct
  REGION 1..11: note = Description of Artificial Sequence: Synthetic peptide
  REGION 1..11: note = Synthetic Construct
RASQSISSWLA

SEQ ID NO: 506 - protein, 11 aa, synthetic construct
  REGION 1..11: note = Description of Artificial Sequence: Synthetic peptide
  REGION 1..11: note = Synthetic Construct
RASQGIDSWLA

SEQ ID NO: 507 - protein, 11 aa, synthetic construct
  REGION 1..11: note = Description of Artificial Sequence: Synthetic peptide
  REGION 1..11: note = Synthetic Construct
QASQDITNYLN

SEQ ID NO: 508 - protein, 16 aa, synthetic construct
  REGION 1..16: note = Description of Artificial Sequence: Synthetic peptide
  REGION 1..16: note = Synthetic Construct
RSSQSLLHSNGYNYLD

SEQ ID NO: 509 - protein, 11 aa, synthetic construct
  REGION 1..11: note = Description of Artificial Sequence: Synthetic peptide
  REGION 1..11: note = Synthetic Construct
RASQGISSWLA

SEQ ID NO: 510 - protein, 11 aa, synthetic construct
  REGION 1..11: note = Description of Artificial Sequence: Synthetic peptide
  REGION 1..11: note = Synthetic Construct
RASQDISSWLA

SEQ ID NO: 511 - protein, 11 aa, synthetic construct
  REGION 1..11: note = Description of Artificial Sequence: Synthetic peptide
  REGION 1..11: note = Synthetic Construct
RASQSVSRYLA

SEQ ID NO: 512 - protein, 7 aa, synthetic construct
  REGION 1..7: note = Description of Artificial Sequence: Synthetic peptide
  REGION 1..7: note = Synthetic Construct
GASTRAT

SEQ ID NO: 513 - protein, 7 aa, synthetic construct
  REGION 1..7: note = Description of Artificial Sequence: Synthetic peptide
  REGION 1..7: note = Synthetic Construct
DASNLAT

SEQ ID NO: 514 - protein, 7 aa, synthetic construct
  REGION 1..7: note = Description of Artificial Sequence: Synthetic peptide
  REGION 1..7: note = Synthetic Construct
SASTRAT

SEQ ID NO: 515 - protein, 7 aa, synthetic construct
  REGION 1..7: note = Description of Artificial Sequence: Synthetic peptide
  REGION 1..7: note = Synthetic Construct
GASSRAT

SEQ ID NO: 516 - protein, 7 aa, synthetic construct
  REGION 1..7: note = Description of Artificial Sequence: Synthetic peptide
  REGION 1..7: note = Synthetic Construct
DASKRAT

SEQ ID NO: 517 - protein, 7 aa, synthetic construct
  REGION 1..7: note = Description of Artificial Sequence: Synthetic peptide
  REGION 1..7: note = Synthetic Construct
GASSLQS

SEQ ID NO: 518 - protein, 7 aa, synthetic construct
  REGION 1..7: note = Description of Artificial Sequence: Synthetic peptide
  REGION 1..7: note = Synthetic Construct
DASNRAT

SEQ ID NO: 519 - protein, 7 aa, synthetic construct
  REGION 1..7: note = Description of Artificial Sequence: Synthetic peptide
  REGION 1..7: note = Synthetic Construct
AASSLQS

SEQ ID NO: 520 - protein, 7 aa, synthetic construct
  REGION 1..7: note = Description of Artificial Sequence: Synthetic peptide
  REGION 1..7: note = Synthetic Construct
DASNLET

SEQ ID NO: 521 - protein, 7 aa, synthetic construct
  REGION 1..7: note = Description of Artificial Sequence: Synthetic peptide
  REGION 1..7: note = Synthetic Construct
WASTRES

SEQ ID NO: 522 - protein, 7 aa, synthetic construct
  REGION 1..7: note = Description of Artificial Sequence: Synthetic peptide
  REGION 1..7: note = Synthetic Construct
DSSNRAT

SEQ ID NO: 523 - protein, 7 aa, synthetic construct
  REGION 1..7: note = Description of Artificial Sequence: Synthetic peptide
  REGION 1..7: note = Synthetic Construct
DASSLES

SEQ ID NO: 524 - protein, 7 aa, synthetic construct
  REGION 1..7: note = Description of Artificial Sequence: Synthetic peptide
  REGION 1..7: note = Synthetic Construct
GASNRAT

SEQ ID NO: 525 - protein, 7 aa, synthetic construct
  REGION 1..7: note = Description of Artificial Sequence: Synthetic peptide
  REGION 1..7: note = Synthetic Construct
LGSHRAS

SEQ ID NO: 526 - protein, 7 aa, synthetic construct
  REGION 1..7: note = Description of Artificial Sequence: Synthetic peptide
  REGION 1..7: note = Synthetic Construct
KASSLES

SEQ ID NO: 527 - protein, 9 aa, synthetic construct
  REGION 1..9: note = Description of Artificial Sequence: Synthetic peptide
  REGION 1..9: note = Synthetic Construct
QQLPYWPPT

SEQ ID NO: 528 - protein, 9 aa, synthetic construct
  REGION 1..9: note = Description of Artificial Sequence: Synthetic peptide
  REGION 1..9: note = Synthetic Construct
QQYFFYPPT

SEQ ID NO: 529 - protein, 9 aa, synthetic construct
  REGION 1..9: note = Description of Artificial Sequence: Synthetic peptide
  REGION 1..9: note = Synthetic Construct
QQPFNFPYT

SEQ ID NO: 530 - protein, 9 aa, synthetic construct
  REGION 1..9: note = Description of Artificial Sequence: Synthetic peptide
  REGION 1..9: note = Synthetic Construct
QQDHDYPFT

SEQ ID NO: 531 - protein, 9 aa, synthetic construct
  REGION 1..9: note = Description of Artificial Sequence: Synthetic peptide
  REGION 1..9: note = Synthetic Construct
QQYFSSPFT

SEQ ID NO: 532 - protein, 9 aa, synthetic construct
  REGION 1..9: note = Description of Artificial Sequence: Synthetic peptide
  REGION 1..9: note = Synthetic Construct
QQRVNLPPT

SEQ ID NO: 533 - protein, 9 aa, synthetic construct
  REGION 1..9: note = Description of Artificial Sequence: Synthetic peptide
  REGION 1..9: note = Synthetic Construct
QQRISYPIT

SEQ ID NO: 534 - protein, 9 aa, synthetic construct
  REGION 1..9: note = Description of Artificial Sequence: Synthetic peptide
  REGION 1..9: note = Synthetic Construct
QQIDDTPIT

SEQ ID NO: 535 - protein, 9 aa, synthetic construct
  REGION 1..9: note = Description of Artificial Sequence: Synthetic peptide
  REGION 1..9: note = Synthetic Construct
QQFSYWPWT

SEQ ID NO: 536 - protein, 9 aa, synthetic construct
  REGION 1..9: note = Description of Artificial Sequence: Synthetic peptide
  REGION 1..9: note = Synthetic Construct
QQHDSSPPT

SEQ ID NO: 537 - protein, 9 aa, synthetic construct
  REGION 1..9: note = Description of Artificial Sequence: Synthetic peptide
  REGION 1..9: note = Synthetic Construct
QQDYSYPWT

SEQ ID NO: 538 - protein, 9 aa, synthetic construct
  REGION 1..9: note = Description of Artificial Sequence: Synthetic peptide
  REGION 1..9: note = Synthetic Construct
QQEYAVPYT

SEQ ID NO: 539 - protein, 9 aa, synthetic construct
  REGION 1..9: note = Description of Artificial Sequence: Synthetic peptide
  REGION 1..9: note = Synthetic Construct
QQVSNYPIT

SEQ ID NO: 540 - protein, 9 aa, synthetic construct
  REGION 1..9: note = Description of Artificial Sequence: Synthetic peptide
  REGION 1..9: note = Synthetic Construct
QQVDNIPPT

SEQ ID NO: 541 - protein, 8 aa, synthetic construct
  REGION 1..8: note = Description of Artificial Sequence: Synthetic peptide
  REGION 1..8: note = Synthetic Construct
QQFDTYPT

SEQ ID NO: 542 - protein, 8 aa, synthetic construct
  REGION 1..8: note = Description of Artificial Sequence: Synthetic peptide
  REGION 1..8: note = Synthetic Construct
QQFLNFPT

SEQ ID NO: 543 - protein, 8 aa, synthetic construct
  REGION 1..8: note = Description of Artificial Sequence: Synthetic peptide
  REGION 1..8: note = Synthetic Construct
QQFFNFPT

SEQ ID NO: 544 - protein, 9 aa, synthetic construct
  REGION 1..9: note = Description of Artificial Sequence: Synthetic peptide
  REGION 1..9: note = Synthetic Construct
QQFIDLPFT

SEQ ID NO: 545 - protein, 9 aa, synthetic construct
  REGION 1..9: note = Description of Artificial Sequence: Synthetic peptide
  REGION 1..9: note = Synthetic Construct
QQYYDLPFT

SEQ ID NO: 546 - protein, 9 aa, synthetic construct
  REGION 1..9: note = Description of Artificial Sequence: Synthetic peptide
  REGION 1..9: note = Synthetic Construct
QQFSSHPFT

SEQ ID NO: 547 - protein, 9 aa, synthetic construct
  REGION 1..9: note = Description of Artificial Sequence: Synthetic peptide
  REGION 1..9: note = Synthetic Construct
QQDDRSPYT

SEQ ID NO: 548 - protein, 9 aa, synthetic construct
  REGION 1..9: note = Description of Artificial Sequence: Synthetic peptide
  REGION 1..9: note = Synthetic Construct
QQAYLPPIT

SEQ ID NO: 549 - protein, 10 aa, synthetic construct
  REGION 1..10: note = Description of Artificial Sequence: Synthetic peptide
  REGION 1..10: note = Synthetic Construct
QQAFSPPPWT

SEQ ID NO: 550 - protein, 8 aa, synthetic construct
  REGION 1..8: note = Description of Artificial Sequence: Synthetic peptide
  REGION 1..8: note = Synthetic Construct
QQDDRSPT

SEQ ID NO: 551 - protein, 9 aa, synthetic construct
  REGION 1..9: note = Description of Artificial Sequence: Synthetic peptide
  REGION 1..9: note = Synthetic Construct
QQEFDLPFT

SEQ ID NO: 552 - protein, 9 aa, synthetic construct
  REGION 1..9: note = Description of Artificial Sequence: Synthetic peptide
  REGION 1..9: note = Synthetic Construct
QQYNNFPPT

SEQ ID NO: 553 - protein, 9 aa, synthetic construct
  REGION 1..9: note = Description of Artificial Sequence: Synthetic peptide
  REGION 1..9: note = Synthetic Construct
QQRYLRPIT

SEQ ID NO: 554 - protein, 8 aa, synthetic construct
  REGION 1..8: note = Description of Artificial Sequence: Synthetic peptide
  REGION 1..8: note = Synthetic Construct
QQPGAVPT

SEQ ID NO: 555 - protein, 9 aa, synthetic construct
  REGION 1..9: note = Description of Artificial Sequence: Synthetic peptide
  REGION 1..9: note = Synthetic Construct
QQVYITPIT

SEQ ID NO: 556 - protein, 9 aa, synthetic construct
  REGION 1..9: note = Description of Artificial Sequence: Synthetic peptide
  REGION 1..9: note = Synthetic Construct
QQPVDLPFT

SEQ ID NO: 557 - protein, 9 aa, synthetic construct
  REGION 1..9: note = Description of Artificial Sequence: Synthetic peptide
  REGION 1..9: note = Synthetic Construct
QQYSFFPPT

SEQ ID NO: 558 - protein, 9 aa, synthetic construct
  REGION 1..9: note = Description of Artificial Sequence: Synthetic peptide
  REGION 1..9: note = Synthetic Construct
QQDSSFPPT

SEQ ID NO: 559 - protein, 9 aa, synthetic construct
  REGION 1..9: note = Description of Artificial Sequence: Synthetic peptide
  REGION 1..9: note = Synthetic Construct
QQSDFPPWT

SEQ ID NO: 560 - protein, 9 aa, synthetic construct
  REGION 1..9: note = Description of Artificial Sequence: Synthetic peptide
  REGION 1..9: note = Synthetic Construct
QQGYSAPIT

SEQ ID NO: 561 - protein, 8 aa, synthetic construct
  REGION 1..8: note = Description of Artificial Sequence: Synthetic peptide
  REGION 1..8: note = Synthetic Construct
QQLFDWPT

SEQ ID NO: 562 - protein, 8 aa, synthetic construct
  REGION 1..8: note = Description of Artificial Sequence: Synthetic peptide
  REGION 1..8: note = Synthetic Construct
QQRAFLFT

SEQ ID NO: 563 - protein, 9 aa, synthetic construct
  REGION 1..9: note = Description of Artificial Sequence: Synthetic peptide
  REGION 1..9: note = Synthetic Construct
QQIDFLPYT

SEQ ID NO: 564 - protein, 9 aa, synthetic construct
  REGION 1..9: note = Description of Artificial Sequence: Synthetic peptide
  REGION 1..9: note = Synthetic Construct
QQVYSPPIT

SEQ ID NO: 565 - protein, 9 aa, synthetic construct
  REGION 1..9: note = Description of Artificial Sequence: Synthetic peptide
  REGION 1..9: note = Synthetic Construct
QQGYAAPIT

SEQ ID NO: 566 - protein, 9 aa, synthetic construct
  REGION 1..9: note = Description of Artificial Sequence: Synthetic peptide
  REGION 1..9: note = Synthetic Construct
QQRYALPIT

SEQ ID NO: 567 - protein, 9 aa, synthetic construct
  REGION 1..9: note = Description of Artificial Sequence: Synthetic peptide
  REGION 1..9: note = Synthetic Construct
QQYASPPIT

SEQ ID NO: 568 - protein, 9 aa, synthetic construct
  REGION 1..9: note = Description of Artificial Sequence: Synthetic peptide
  REGION 1..9: note = Synthetic Construct
QQVYSTPIT

SEQ ID NO: 569 - protein, 8 aa, synthetic construct
  REGION 1..8: note = Description of Artificial Sequence: Synthetic peptide
  REGION 1..8: note = Synthetic Construct
QQLVHWPT

SEQ ID NO: 570 - protein, 8 aa, synthetic construct
  REGION 1..8: note = Description of Artificial Sequence: Synthetic peptide
  REGION 1..8: note = Synthetic Construct
QQLDDWFT

SEQ ID NO: 571 - protein, 9 aa, synthetic construct
  REGION 1..9: note = Description of Artificial Sequence: Synthetic peptide
  REGION 1..9: note = Synthetic Construct
QQRSNYPIT

SEQ ID NO: 572 - protein, 9 aa, synthetic construct
  REGION 1..9: note = Description of Artificial Sequence: Synthetic peptide
  REGION 1..9: note = Synthetic Construct
QQRILYPIT

SEQ ID NO: 573 - protein, 9 aa, synthetic construct
  REGION 1..9: note = Description of Artificial Sequence: Synthetic peptide
  REGION 1..9: note = Synthetic Construct
QQRAAYPIT

SEQ ID NO: 574 - protein, 9 aa, synthetic construct
  REGION 1..9: note = Description of Artificial Sequence: Synthetic peptide
  REGION 1..9: note = Synthetic Construct
QQRTSHPIT

SEQ ID NO: 575 - protein, 9 aa, synthetic construct
  REGION 1..9: note = Description of Artificial Sequence: Synthetic peptide
  REGION 1..9: note = Synthetic Construct
QQYAGSPFT

SEQ ID NO: 576 - protein, 8 aa, synthetic construct
  REGION 1..8: note = Description of Artificial Sequence: Synthetic peptide
  REGION 1..8: note = Synthetic Construct
QQFDDVFT

SEQ ID NO: 577 - protein, 9 aa, synthetic construct
  REGION 1..9: note = Description of Artificial Sequence: Synthetic peptide
  REGION 1..9: note = Synthetic Construct
QQYVNSPFT

SEQ ID NO: 578 - protein, 9 aa, synthetic construct
  REGION 1..9: note = Description of Artificial Sequence: Synthetic peptide
  REGION 1..9: note = Synthetic Construct
QQSDDDPFT

SEQ ID NO: 579 - protein, 9 aa, synthetic construct
  REGION 1..9: note = Description of Artificial Sequence: Synthetic peptide
  REGION 1..9: note = Synthetic Construct
QQLSTYPLT

SEQ ID NO: 580 - protein, 9 aa, synthetic construct
  REGION 1..9: note = Description of Artificial Sequence: Synthetic peptide
  REGION 1..9: note = Synthetic Construct
QQRSVYPIT

SEQ ID NO: 581 - protein, 9 aa, synthetic construct
  REGION 1..9: note = Description of Artificial Sequence: Synthetic peptide
  REGION 1..9: note = Synthetic Construct
QQVSLFPLT

SEQ ID NO: 582 - protein, 10 aa, synthetic construct
  REGION 1..10: note = Description of Artificial Sequence: Synthetic peptide
  REGION 1..10: note = Synthetic Construct
LDYNSYSPIT

SEQ ID NO: 583 - protein, 9 aa, synthetic construct
  REGION 1..9: note = Description of Artificial Sequence: Synthetic peptide
  REGION 1..9: note = Synthetic Construct
QQHIALPFT

SEQ ID NO: 584 - protein, 9 aa, synthetic construct
  REGION 1..9: note = Description of Artificial Sequence: Synthetic peptide
  REGION 1..9: note = Synthetic Construct
QQRASMPIT

SEQ ID NO: 585 - protein, 9 aa, synthetic construct
  REGION 1..9: note = Description of Artificial Sequence: Synthetic peptide
  REGION 1..9: note = Synthetic Construct
QQAFNRPPT

SEQ ID NO: 586 - protein, 9 aa, synthetic construct
  REGION 1..9: note = Description of Artificial Sequence: Synthetic peptide
  REGION 1..9: note = Synthetic Construct
QQSSVHPYT

SEQ ID NO: 587 - protein, 9 aa, synthetic construct
  REGION 1..9: note = Description of Artificial Sequence: Synthetic peptide
  REGION 1..9: note = Synthetic Construct
QQAYSLPPT

SEQ ID NO: 588 - protein, 8 aa, synthetic construct
  REGION 1..8: note = Description of Artificial Sequence: Synthetic peptide
  REGION 1..8: note = Synthetic Construct
QQDDDGYT

SEQ ID NO: 589 - protein, 9 aa, synthetic construct
  REGION 1..9: note = Description of Artificial Sequence: Synthetic peptide
  REGION 1..9: note = Synthetic Construct
QQDYSWPYT

SEQ ID NO: 590 - protein, 9 aa, synthetic construct
  REGION 1..9: note = Description of Artificial Sequence: Synthetic peptide
  REGION 1..9: note = Synthetic Construct
QQRSAYPIT

SEQ ID NO: 591 - protein, 9 aa, synthetic construct
  REGION 1..9: note = Description of Artificial Sequence: Synthetic peptide
  REGION 1..9: note = Synthetic Construct
QQRSHFPIT

SEQ ID NO: 592 - protein, 9 aa, synthetic construct
  REGION 1..9: note = Description of Artificial Sequence: Synthetic peptide
  REGION 1..9: note = Synthetic Construct
QQRANYPIT

SEQ ID NO: 593 - protein, 9 aa, synthetic construct
  REGION 1..9: note = Description of Artificial Sequence: Synthetic peptide
  REGION 1..9: note = Synthetic Construct
QQRADYPIT

SEQ ID NO: 594 - protein, 9 aa, synthetic construct
  REGION 1..9: note = Description of Artificial Sequence: Synthetic peptide
  REGION 1..9: note = Synthetic Construct
QQAGSHPFT

SEQ ID NO: 595 - protein, 9 aa, synthetic construct
  REGION 1..9: note = Description of Artificial Sequence: Synthetic peptide
  REGION 1..9: note = Synthetic Construct
QQDVNYPPT

SEQ ID NO: 596 - protein, 9 aa, synthetic construct
  REGION 1..9: note = Description of Artificial Sequence: Synthetic peptide
  REGION 1..9: note = Synthetic Construct
QQDDNYPYT

SEQ ID NO: 597 - protein, 9 aa, synthetic construct
  REGION 1..9: note = Description of Artificial Sequence: Synthetic peptide
  REGION 1..9: note = Synthetic Construct
QQRSTFPIT

SEQ ID NO: 598 - protein, 9 aa, synthetic construct
  REGION 1..9: note = Description of Artificial Sequence: Synthetic peptide
  REGION 1..9: note = Synthetic Construct
QQVSNYPFT

SEQ ID NO: 599 - protein, 9 aa, synthetic construct
  REGION 1..9: note = Description of Artificial Sequence: Synthetic peptide
  REGION 1..9: note = Synthetic Construct
QQYHDAPIT

SEQ ID NO: 600 - protein, 9 aa, synthetic construct
  REGION 1..9: note = Description of Artificial Sequence: Synthetic peptide
  REGION 1..9: note = Synthetic Construct
QQAYVVPPT

SEQ ID NO: 601 - protein, 9 aa, synthetic construct
  REGION 1..9: note = Description of Artificial Sequence: Synthetic peptide
  REGION 1..9: note = Synthetic Construct
QQADNWPFT

SEQ ID NO: 602 - protein, 9 aa, synthetic construct
  REGION 1..9: note = Description of Artificial Sequence: Synthetic peptide
  REGION 1..9: note = Synthetic Construct
MQALESPRT

SEQ ID NO: 603 - protein, 9 aa, synthetic construct
  REGION 1..9: note = Description of Artificial Sequence: Synthetic peptide
  REGION 1..9: note = Synthetic Construct
QQYVNWPFT

SEQ ID NO: 604 - protein, 9 aa, synthetic construct
  REGION 1..9: note = Description of Artificial Sequence: Synthetic peptide
  REGION 1..9: note = Synthetic Construct
QQSSNWPWT

SEQ ID NO: 605 - protein, 9 aa, synthetic construct
  REGION 1..9: note = Description of Artificial Sequence: Synthetic peptide
  REGION 1..9: note = Synthetic Construct
QQASTFPIT

SEQ ID NO: 606 - protein, 9 aa, synthetic construct
  REGION 1..9: note = Description of Artificial Sequence: Synthetic peptide
  REGION 1..9: note = Synthetic Construct
QQRNSLPLT

SEQ ID NO: 607 - protein, 9 aa, synthetic construct
  REGION 1..9: note = Description of Artificial Sequence: Synthetic peptide
  REGION 1..9: note = Synthetic Construct
QQSYDFPIT

SEQ ID NO: 608 - protein, 10 aa, synthetic construct
  REGION 1..10: note = Description of Artificial Sequence: Synthetic peptide
  REGION 1..10: note = Synthetic Construct
QQEVDYPPLT

SEQ ID NO: 609 - protein, 9 aa, synthetic construct
  REGION 1..9: note = Description of Artificial Sequence: Synthetic peptide
  REGION 1..9: note = Synthetic Construct
QQLNSYSPT

SEQ ID NO: 610 - protein, 9 aa, synthetic construct
  REGION 1..9: note = Description of Artificial Sequence: Synthetic peptide
  REGION 1..9: note = Synthetic Construct
QQYIFWPPT

SEQ ID NO: 611 - protein, 8 aa, synthetic construct
  REGION 1..8: note = Description of Artificial Sequence: Synthetic peptide
  REGION 1..8: note = Synthetic Construct
GDLWFPGE

SEQ ID NO: 612 - protein, 14 aa, synthetic construct
  REGION 1..14: note = Description of Artificial Sequence: Synthetic peptide
  REGION 1..14: note = Synthetic Construct
DLWFPGESESFEDA

SEQ ID NO: 613 - protein, 14 aa, synthetic construct
  REGION 1..14: note = Description of Artificial Sequence: Synthetic peptide
  REGION 1..14: note = Synthetic Construct
DLWVPEESSSFEGA

SEQ ID NO: 614 - protein, 15 aa, synthetic construct
  REGION 1..15: note = Description of Artificial Sequence: Synthetic peptide
  REGION 1..15: note = Synthetic Construct
ADPLDHRDAGDLWFP

SEQ ID NO: 615 - protein, 13 aa, synthetic construct
  REGION 1..13: note = Description of Artificial Sequence: Synthetic peptide
  REGION 1..13: note = Synthetic Construct
SISRSLLEGEIPF

SEQ ID NO: 616 - protein, 118 aa, synthetic construct
  REGION 1..118: note = Description of Artificial Sequence: Synthetic polypeptide
  REGION 1..118: note = Synthetic Construct
EVQLLESGGGLVQPGGSLRLSCAASGFTFSSYAMSWVRQAPGKGLEWVSVISGSGGSTYYADSVKGRFTISRDNSKNTLYLQMNSLRAEDTAVYYCAKGTPTLLFQHWGQGTLVTVSS

SEQ ID NO: 617 - protein, 107 aa, synthetic construct
  REGION 1..107: note = Description of Artificial Sequence: Synthetic polypeptide
  REGION 1..107: note = Synthetic Construct
EIVMTQSPATLSVSPGERATLSCRASQSVSSNLAWYQQKPGQAPRLLIYGASTRATGIPARFSGSGSGTEFTLTISSLQSEDFAVYYCQQLPYWPPTFGGGTKVEIK

SEQ ID NO: 618 - protein, 128 aa, synthetic construct
  REGION 1..128: note = Description of Artificial Sequence: Synthetic polypeptide
  REGION 1..128: note = Synthetic Construct
EVQLLESGGGLVQPGGSLRLSCAASGFTFSSSAMSWVRQAPGKGLEWVSAISGSGGSTYYADSVKGRFTISRDNSKNTLYLQMNSLRAEDTAVYYCAKVPSYDYWSGYSNYYYYMDVWGKGTTVTVSS

SEQ ID NO: 619 - protein, 107 aa, synthetic construct
  REGION 1..107: note = Description of Artificial Sequence: Synthetic polypeptide
  REGION 1..107: note = Synthetic Construct
EIVLTQSPATLSVSPGERATLSCRASQSVGSNLAWYQQKPGQAPRLLIYGASTRATGIPARFSGSGSGTEFTLTISSLQSEDFAVYYCQQYFFYPPTFGGGTKVEIK

SEQ ID NO: 620 - protein, 118 aa, synthetic construct
  REGION 1..118: note = Description of Artificial Sequence: Synthetic polypeptide
  REGION 1..118: note = Synthetic Construct
QVQLVQSGAEVKKPGSSVKVSCKASGGTFSSYAISWVRQAPGQGLEWMGGIIPIFGTANYAQKFQGRVTITADESTSTAYMELSSLRSEDTAVYYCAREQYHVGMDVWGKGTTVTVSS

SEQ ID NO: 621 - protein, 107 aa, synthetic construct
  REGION 1..107: note = Description of Artificial Sequence: Synthetic polypeptide
  REGION 1..107: note = Synthetic Construct
DIQMTQSPSSLSASVGDRVTITCQASQDISNYLNWYQQKPGKAPKLLIYDASNLATGVPSRFSGSGSGTDFTFTISSLQPEDIATYYCQQPFNFPYTFGGGTKVEIK

SEQ ID NO: 622 - protein, 117 aa, synthetic construct
  REGION 1..117: note = Description of Artificial Sequence: Synthetic polypeptide
  REGION 1..117: note = Synthetic Construct
QVQLVQSGAEVKKPGSSVKVSCKASGGTFSSYAISWVRQAPGQGLEWMGGIIPIFGTASYAQKFQGRVTITADESTSTAYMELSSLRSEDTAVYYCARGVDSIMDYWGQGTLVTVSS

SEQ ID NO: 623 - protein, 107 aa, synthetic construct
  REGION 1..107: note = Description of Artificial Sequence: Synthetic polypeptide
  REGION 1..107: note = Synthetic Construct
EIVMTQSPATLSVSPGERATLSCRASQSVSSNLAWYQQKPGQAPRLLIYSASTRATGIPARFSGSGSGTEFTLTISSLQSEDFAVYYCQQDHDYPFTFGGGTKVEIK

SEQ ID NO: 624 - protein, 120 aa, synthetic construct
  REGION 1..120: note = Description of Artificial Sequence: Synthetic polypeptide
  REGION 1..120: note = Synthetic Construct
QVQLVQSGAEVKKPGASVKVSCKASGYTFTSYYIHWVRQAPGQGLEWMGIINPSGGSTSYAQKFQGRVTMTRDTSTSTVYMELSSLRSEDTAVYYCARAPQESPYVFDIWGQGTMVTVSS

SEQ ID NO: 625 - protein, 108 aa, synthetic construct
  REGION 1..108: note = Description of Artificial Sequence: Synthetic polypeptide
  REGION 1..108: note = Synthetic Construct
EIVMTQSPGTLSLSPGERATLSCRASQSVSSSYLAWYQQKPGQAPRLLIYGASSRATGIPDRFSGSGSGTDFTLTISRLEPEDFAVYYCQQYFSSPFTFGGGTKVEIK

SEQ ID NO: 626 - protein, 120 aa, synthetic construct
  REGION 1..120: note = Description of Artificial Sequence: Synthetic polypeptide
  REGION 1..120: note = Synthetic Construct
QVQLVQSGAEVKKPGASVKVSCKASGYTFTSYYMHWVRQAPGQGLEWMGIINPGGGSTSYAQKFQGRVTMTRDTSTSTVYMELSSLRSEDTAVYYCARGSPTYGYLYDPWGQGTLVTVSS

SEQ ID NO: 627 - protein, 107 aa, synthetic construct
  REGION 1..107: note = Description of Artificial Sequence: Synthetic polypeptide
  REGION 1..107: note = Synthetic Construct
EIVLTQSPATLSLSPGERATLSCRASQSVSSYLAWYQQKPGQAPRLLIYDASKRATGIPARFSGSGSGTDFTLTISSLEPEDFAVYYCQQRVNLPPTFGGGTKVEIK

SEQ ID NO: 628 - protein, 117 aa, synthetic construct
  REGION 1..117: note = Description of Artificial Sequence: Synthetic polypeptide
  REGION 1..117: note = Synthetic Construct
QVQLVQSGAEVKKPGASVKVSCKASGYTFTSYYMHWVRQAPGQGLEWMGIINPSGGSTTYAQKFQGRVTMTRDTSTSTVYMELSSLRSEDTAVYYCARTSSKERDYWGQGTLVTVSS

SEQ ID NO: 629 - protein, 107 aa, synthetic construct
  REGION 1..107: note = Description of Artificial Sequence: Synthetic polypeptide
  REGION 1..107: note = Synthetic Construct
EIVLTQSPATLSLSPGERATLSCRASQSVSSYLAWYQQKPGQAPRLLIYDASKRATGIPARFSGSGSGTDFTLTISSLEPEDFAVYYCQQRISYPITFGGGTKVEIK

SEQ ID NO: 630 - protein, 121 aa, synthetic construct
  REGION 1..121: note = Description of Artificial Sequence: Synthetic polypeptide
  REGION 1..121: note = Synthetic Construct
QLQLQESGPGLVKPSETLSLTCTVSGGSISSSSYYWGWIRQPPGKGLEWIGSISYSGSTYYNPSLKSRVTISVDTSKNQFSLKLSSVTAADTAVYYCARGPYRLLLGMDVWGQGTTVTVSS

SEQ ID NO: 631 - protein, 107 aa, synthetic construct
  REGION 1..107: note = Description of Artificial Sequence: Synthetic polypeptide
  REGION 1..107: note = Synthetic Construct
DIQMTQSPSSLSASVGDRVTITCRASQSISSYLNWYQQKPGKAPKLLIYGASSLQSGVPSRFSGSGSGTDFTLTISSLQPEDFATYYCQQIDDTPITFGGGTKVEIK

SEQ ID NO: 632 - protein, 121 aa, synthetic construct
  REGION 1..121: note = Description of Artificial Sequence: Synthetic polypeptide
  REGION 1..121: note = Synthetic Construct
EVQLVQSGAEVKKPGESLKISCKGSGYSFTSYWIGWVRQMPGKGLEWMGIIYPGDSDTTYSPSFQGQVTISADKSISTAYLQWSSLKASDTAMYYCARLHISGEVNWFDPWGQGTLVTVSS

SEQ ID NO: 633 - protein, 107 aa, synthetic construct
  REGION 1..107: note = Description of Artificial Sequence: Synthetic polypeptide
  REGION 1..107: note = Synthetic Construct
EIVLTQSPATLSLSPGERATLSCRASQSVSSYLAWYQQKPGQAPRLLIYDASNRATGIPARFSGSGSGTDFTLTISSLEPEDFAVYYCQQFSYWPWTFGGGTKVEIK

SEQ ID NO: 634 - protein, 122 aa, synthetic construct
  REGION 1..122: note = Description of Artificial Sequence: Synthetic polypeptide
  REGION 1..122: note = Synthetic Construct
EVQLVQSGAEVKKPGESLKISCKGSGYSFTSNWIGWVRQMPGKGLEWMGIIYPGDSDTRYSPSFQGQVTISADKSISTAYLQWSSLKASDTAMYYCAREAGYDYGELAFDIWGQGTMVTVSS

SEQ ID NO: 635 - protein, 108 aa, synthetic construct
  REGION 1..108: note = Description of Artificial Sequence: Synthetic polypeptide
  REGION 1..108: note = Synthetic Construct
EIVLTQSPGTLSLSPGERATLSCRASQSVSSSYLAWYQQKPGQAPRLLIYGASSRATGIPDRFSGSGSGTDFTLTISRLEPEDFAVYYCQQHDSSPPTFGGGTKVEIK

SEQ ID NO: 636 - protein, 122 aa, synthetic construct
  REGION 1..122: note = Description of Artificial Sequence: Synthetic polypeptide
  REGION 1..122: note = Synthetic Construct
EVQLVQSGAEVKKPGESLKISCKGSGYSFTTYWIGWVRQMPGKGLEWMGIIYPGDSDTRYSPSFQGQVTISADKSISTAYLQWSSLKASDTAMYYCARAGHYDGGHLGMDVWGQGTTVTVSS

SEQ ID NO: 637 - protein, 108 aa, synthetic construct
  REGION 1..108: note = Description of Artificial Sequence: Synthetic polypeptide
  REGION 1..108: note = Synthetic Construct
EIVLTQSPGTLSLSPGERATLSCRASQSVSSDYLAWYQQKPGQAPRLLIYGASSRATGIPDRFSGSGSGTDFTLTISRLEPEDFAVYYCQQDYSYPWTFGGGTKVEIK

SEQ ID NO: 638 - protein, 124 aa, synthetic construct
  REGION 1..124: note = Description of Artificial Sequence: Synthetic polypeptide
  REGION 1..124: note = Synthetic Construct
EVQLVQSGAEVKKPGESLKISCKGSGYSFTSYWIGWVRQMPGKGLEWMGIIYPGDSDTRYSPSFQGQVTISADKSISTAYLQWSSLKASDTAMYYCARLGHYSGTVSSYGMDVWGQGTTVTVSS

SEQ ID NO: 639 - protein, 107 aa, synthetic construct
  REGION 1..107: note = Description of Artificial Sequence: Synthetic polypeptide
  REGION 1..107: note = Synthetic Construct
DIQMTQSPSSLSASVGDRVTITCRASQSISSYLNWYQQKPGKAPKLLIYAASSLQSGVPSRFSGSGSGTDFTLTISSLQPEDFATYYCQQEYAVPYTFGGGTKVEIK

SEQ ID NO: 640 - protein, 118 aa, synthetic construct
  REGION 1..118: note = Description of Artificial Sequence: Synthetic polypeptide
  REGION 1..118: note = Synthetic Construct
QVQLVQSGAEVKKPGASVKVSCKASGYTFTSYGISWVRQAPGQGLEWMGWISAYNGNTNYAQKLQGRVTMTTDTSTSTAYMELRSLRSDDTAVYYCARGPSHYYDLAWGQGTLVTVSS

SEQ ID NO: 641 - protein, 107 aa, synthetic construct
  REGION 1..107: note = Description of Artificial Sequence: Synthetic polypeptide
  REGION 1..107: note = Synthetic Construct
EIVLTQSPATLSLSPGERATLSCRASQSVSSYLAWYQQKPGQAPRLLIYDASNRATGIPARFSGSGSGTDFTLTISSLEPEDFAVYYCQQVSNYPITFGGGTKVEIK

SEQ ID NO: 642 - protein, 120 aa, synthetic construct
  REGION 1..120: note = Description of Artificial Sequence: Synthetic polypeptide
  REGION 1..120: note = Synthetic Construct
QVQLQESGPGLVKPSQTLSLTCTVSGGSISSGGYYWSWIRQHPGKGLEWIGNIYYSGSTVYNPSLKSRVTISVDTSKNQFSLKLSSVTAADTAVYYCARGLYGYGVLDVWGQGTMVTVSS

SEQ ID NO: 643 - protein, 107 aa, synthetic construct
  REGION 1..107: note = Description of Artificial Sequence: Synthetic polypeptide
  REGION 1..107: note = Synthetic Construct
DIQMTQSPSSLSASVGDRVTITCQASQDISNYLNWYQQKPGKAPKLLIYDASNLETGVPSRFSGSGSGTDFTFTISSLQPEDIATYYCQQVDNIPPTFGGGTKVEIK

SEQ ID NO: 644 - protein, 106 aa, synthetic construct
  REGION 1..106: note = Description of Artificial Sequence: Synthetic polypeptide
  REGION 1..106: note = Synthetic Construct
DIQMTQSPSSLSASVGDRVTITCQASQDISNYLNWYQQKPGKAPKLLIYDASNLETGVPSRFSGSGSGTDFTFTISSLQPEDIATYYCQQFDTYPTFGGGTKVEIK

SEQ ID NO: 645 - protein, 120 aa, synthetic construct
  REGION 1..120: note = Description of Artificial Sequence: Synthetic polypeptide
  REGION 1..120: note = Synthetic Construct
QLQLQESGPGLVKPSETLSLTCTVSGGSISSNSYYWGWIRQPPGKGLEWIGSIYYSGSTYYNPSLKSRVTISVDTSKNQFSLKLSSVTAADTAVYYCARGVLGYGVFDYWGQGTLVTVSS

SEQ ID NO: 646 - protein, 106 aa, synthetic construct
  REGION 1..106: note = Description of Artificial Sequence: Synthetic polypeptide
  REGION 1..106: note = Synthetic Construct
DIQMTQSPSSLSASVGDRVTITCQASQDISNYLNWYQQKPGKAPKLLIYDASNLETGVPSRFSGSGSGTDFTFTISSLQPEDIATYYCQQFLNFPTFGGGTKVEIK

SEQ ID NO: 647 - protein, 106 aa, synthetic construct
  REGION 1..106: note = Description of Artificial Sequence: Synthetic polypeptide
  REGION 1..106: note = Synthetic Construct
DIQMTQSPSSLSASVGDRVTITCQASQDISNYLNWYQQKPGKAPKLLIYDASNLETGVPSRFSGSGSGTDFTFTISSLQPEDIATYYCQQFFNFPTFGGGTKVEIK

SEQ ID NO: 648 - protein, 122 aa, synthetic construct
  REGION 1..122: note = Description of Artificial Sequence: Synthetic polypeptide
  REGION 1..122: note = Synthetic Construct
QVQLQESGPGLVKPSETLSLTCTVSGGSISSYYWSWIRQPPGKGLEWIGSIYYSGSTNYNPSLKSRVTISVDTSKNQFSLKLSSVTAADTAVYYCARDGGGEYPSGTPFDIWGQGTMVTVSS

SEQ ID NO: 649 - protein, 107 aa, synthetic construct
  REGION 1..107: note = Description of Artificial Sequence: Synthetic polypeptide
  REGION 1..107: note = Synthetic Construct
DIQMTQSPSSLSASVGDRVTITCQASQDISNYLNWYQQKPGKAPKLLIYDASNLETGVPSRFSGSGSGTDFTFTISSLQPEDIATYYCQQFIDLPFTFGGGTKVEIK

SEQ ID NO: 650 - protein, 107 aa, synthetic construct
  REGION 1..107: note = Description of Artificial Sequence: Synthetic polypeptide
  REGION 1..107: note = Synthetic Construct
DIQMTQSPSSLSASVGDRVTITCQASQDISNYLNWYQQKPGKAPKLLIYDASNLETGVPSRFSGSGSGTDFTFTISSLQPEDIATYYCQQYYDLPFTFGGGTKVEIK

SEQ ID NO: 651 - protein, 117 aa, synthetic construct
  REGION 1..117: note = Description of Artificial Sequence: Synthetic polypeptide
  REGION 1..117: note = Synthetic Construct
QVQLQESGPGLVKPSETLSLTCTVSGGSISSYYWSWIRQPPGKGLEWIGSIYYSGSTNYNPSLKSRVTISVDTSKNQFSLKLSSVTAADTAVYYCARSGMASFFDYWGQGTLVTVSS

SEQ ID NO: 652 - protein, 108 aa, synthetic construct
  REGION 1..108: note = Description of Artificial Sequence: Synthetic polypeptide
  REGION 1..108: note = Synthetic Construct
EIVLTQSPGTLSLSPGERATLSCRASQSVSSDYLAWYQQKPGQAPRLLIYGASSRATGIPDRFSGSGSGTDFTLTISRLEPEDFAVYYCQQFSSHPFTFGGGTKVEIK

SEQ ID NO: 653 - protein, 108 aa, synthetic construct
  REGION 1..108: note = Description of Artificial Sequence: Synthetic polypeptide
  REGION 1..108: note = Synthetic Construct
EIVMTQSPGTLSLSPGERATLSCRASQSVSSSYLAWYQQKPGQAPRLLIYGASSRATGIPDRFSGSGSGTDFTLTISRLEPEDFAVYYCQQDDRSPYTFGGGTKVEIK

SEQ ID NO: 654 - protein, 117 aa, synthetic construct
  REGION 1..117: note = Description of Artificial Sequence: Synthetic polypeptide
  REGION 1..117: note = Synthetic Construct
EVQLLESGGGLVQPGGSLRLSCAASGFTFSSYAMSWVRQAPGKGLEWVSAISGSGGSTYYADSVKGRFTISRDNSKNTLYLQMNSLRAEDTAVYYCAKLGGHSMDVWGQGTTVTVSS

SEQ ID NO: 655 - protein, 113 aa, synthetic construct
  REGION 1..113: note = Description of Artificial Sequence: Synthetic polypeptide
  REGION 1..113: note = Synthetic Construct
DIVMTQSPDSLAVSLGERATINCKSSQSVLYSSNNKNYLAWYQQKPGQPPKLLISWASTRESGVPDRFSGSGSGTDFTLTISSLQAEDVAVYYCQQAYLPPITFGGGTKVEIK

SEQ ID NO: 656 - protein, 118 aa, synthetic construct
  REGION 1..118: note = Description of Artificial Sequence: Synthetic polypeptide
  REGION 1..118: note = Synthetic Construct
EVQLLESGGGLVQPGGSLRLSCAASGFTFSSYAMSWVRQAPGKGLEWVSAISGSGGSTYYADSVKGRFTISRDNSKNTLYLQMNSLRAEDTAVYYCAKPLKRGRGFYWGQGTLVTVSS

SEQ ID NO: 657 - protein, 108 aa, synthetic construct
  REGION 1..108: note = Description of Artificial Sequence: Synthetic polypeptide
  REGION 1..108: note = Synthetic Construct
DIQMTQSPSSLSASVGDRVTITCRASQSISSYLNWYQQKPGKAPKLLIYAASSLQSGVPSRFSGSGSGTDFTLTISSLQPEDFATYYCQQAFSPPPWTFGGGTKVEIK

SEQ ID NO: 658 - protein, 117 aa, synthetic construct
  REGION 1..117: note = Description of Artificial Sequence: Synthetic polypeptide
  REGION 1..117: note = Synthetic Construct
EVQLLESGGGLVQPGGSLRLSCAASGFTFSSYAMSWVRQAPGKGLEWVSVISGSGGSTYYADSVKGRFTISRDNSKNTLYLQMNSLRAEDTAVYYCAKEGRTITMDWGQGTLVTVSS

SEQ ID NO: 659 - protein, 107 aa, synthetic construct
  REGION 1..107: note = Description of Artificial Sequence: Synthetic polypeptide
  REGION 1..107: note = Synthetic Construct
EIVLTQSPGTLSLSPGERATLSCRASQSVSSSYLAWYQQKPGQAPRLLIYGASSRATGIPDRFSGSGSGTDFTLTISRLEPEDFAVYYCQQDDRSPTFGGGTKVEIK

SEQ ID NO: 660 - protein, 117 aa, synthetic construct
  REGION 1..117: note = Description of Artificial Sequence: Synthetic polypeptide
  REGION 1..117: note = Synthetic Construct
EVQLLESGGGLVQPGGSLRLSCAASGFTFSSYAMSWVRQAPGKGLEWVSVISGSGGSTYYADSVKGRFTISRDNSKNTLYLQMNSLRAEDTAVYYCAKDQYSVLDYWGQGTLVTVSS

SEQ ID NO: 661 - protein, 107 aa, synthetic construct
  REGION 1..107: note = Description of Artificial Sequence: Synthetic polypeptide
  REGION 1..107: note = Synthetic Construct
EIVLTQSPATLSLSPGERATLSCRASQSVSSYLAWYQQKPGQAPRLLIYDASNRATGIPARFSGSGSGTDFTLTISSLEPEDFAVYYCQQEFDLPFTFGGGTKVEIK

SEQ ID NO: 662 - protein, 120 aa, synthetic construct
  REGION 1..120: note = Description of Artificial Sequence: Synthetic polypeptide
  REGION 1..120: note = Synthetic Construct
EVQLLESGGGLVQPGGSLRLSCAASGFTFSSYAMSWVRQAPGKGLEWVSAISGSGGSTYYADSVKGRFTISRDNSKNTLYLQMNSLRAEDTAVYYCAKKYSSRGVYFDYWGQGTLVTVSS

SEQ ID NO: 663 - protein, 107 aa, synthetic construct
  REGION 1..107: note = Description of Artificial Sequence: Synthetic polypeptide
  REGION 1..107: note = Synthetic Construct
EIVLTQSPATLSLSPGERATLSCRASQSVSSYLAWYQQKPGQAPRLLIYDASNRATGIPARFSGSGSGTDFTLTISSLEPEDFAVYYCQQYNNFPPTFGGGTKVEIK

SEQ ID NO: 664 - protein, 124 aa, synthetic construct
  REGION 1..124: note = Description of Artificial Sequence: Synthetic polypeptide
  REGION 1..124: note = Synthetic Construct
EVQLLESGGGLVQPGGSLRLSCAASGFTFSSYAMSWVRQAPGKGLEWVSAISGSGGSTYYADSVKGRFTISRDNSKNTLYLQMNSLRAEDTAVYYCARLGGAVGARHVTYFDYWGQGTLVTVSS

SEQ ID NO: 665 - protein, 107 aa, synthetic construct
  REGION 1..107: note = Description of Artificial Sequence: Synthetic polypeptide
  REGION 1..107: note = Synthetic Construct
EIVLTQSPATLSLSPGERATLSCRASQSVSSYLAWYQQKPGQAPRLLIYDASKRATGIPARFSGSGSGTDFTLTISSLEPEDFAVYYCQQRYLRPITFGGGTKVEIK

SEQ ID NO: 666 - protein, 121 aa, synthetic construct
  REGION 1..121: note = Description of Artificial Sequence: Synthetic polypeptide
  REGION 1..121: note = Synthetic Construct
QVQLVESGGGVVQPGRSLRLSCAASGFTFSSYGMHWVRQAPGKGLEWVAVISYDGSNKYYADSVKGRFTISRDNSKNTLYLQMNSLRAEDTAVYYCARGQYYGGSGWFDPWGQGTLVTVSS

SEQ ID NO: 667 - protein, 107 aa, synthetic construct
  REGION 1..107: note = Description of Artificial Sequence: Synthetic polypeptide
  REGION 1..107: note = Synthetic Construct
EIVLTQSPGTLSLSPGERATLSCRASQSVSSSYLAWYQQKPGQAPRLLIYGASSRATGIPDRFSGSGSGTDFTLTISRLEPEDFAVYYCQQPGAVPTFGGGTKVEIK

SEQ ID NO: 668 - protein, 119 aa, synthetic construct
  REGION 1..119: note = Description of Artificial Sequence: Synthetic polypeptide
  REGION 1..119: note = Synthetic Construct
EVQLLESGGGLVQPGGSLRLSCAASGFTFSSYAMSWVRQAPGKGLEWVSAISGSGGSTYYADSVKGRFTISRDNSKNTLYLQMNSLRAEDTAVYYCARLGQEYAYFQHWGQGTLVTVSS

SEQ ID NO: 669 - protein, 107 aa, synthetic construct
  REGION 1..107: note = Description of Artificial Sequence: Synthetic polypeptide
  REGION 1..107: note = Synthetic Construct
DIQMTQSPSSLSASVGDRVTITCRASQSISSYLNWYQQKPGKAPKLLIYGASSLQSGVPSRFSGSGSGTDFTLTISSLQPEDFATYYCQQVYITPITFGGGTKVEIK

SEQ ID NO: 670 - protein, 121 aa, synthetic construct
  REGION 1..121: note = Description of Artificial Sequence: Synthetic polypeptide
  REGION 1..121: note = Synthetic Construct
QVQLVESGGGVVQPGRSLRLSCAASGFTFSSYGMHWVRQAPGKGLEWVALIWYDGSNKYYADSVKGRFTISRDNSKNTLYLQMNSLRAEDTAVYYCARRRDGYYDEVFDIWGQGTMVTVSS

SEQ ID NO: 671 - protein, 107 aa, synthetic construct
  REGION 1..107: note = Description of Artificial Sequence: Synthetic polypeptide
  REGION 1..107: note = Synthetic Construct
DIQLTQSPSSLSASVGDRVTITCQASQDISNFLNWYQQKPGKAPKLLIYDASNLETGVPSRFSGSGSGTDFTFTISSLQPEDIATYYCQQPVDLPFTFGGGTKVEIK

SEQ ID NO: 672 - protein, 119 aa, synthetic construct
  REGION 1..119: note = Description of Artificial Sequence: Synthetic polypeptide
  REGION 1..119: note = Synthetic Construct
EVQLLESGGGLVQPGGSLRLSCAASGFTFSSYAMSWVRQAPGKGLEWVSAISGSGGSTYYADSVKGRFTISRDNSKNTLYLQMNSLRAEDTAVYYCARVPKHYVVLDYWGQGTLVTVSS

SEQ ID NO: 673 - protein, 107 aa, synthetic construct
  REGION 1..107: note = Description of Artificial Sequence: Synthetic polypeptide
  REGION 1..107: note = Synthetic Construct
EIVLTQSPATLSLSPGERATLSCRASQSVSSYLAWYQQKPGQAPRLLIYDASNRATGIPARFSGSGSGTDFTLTISSLEPEDFAVYYCQQYSFFPPTFGGGTKVEIK

SEQ ID NO: 674 - protein, 117 aa, synthetic construct
  REGION 1..117: note = Description of Artificial Sequence: Synthetic polypeptide
  REGION 1..117: note = Synthetic Construct
QVQLVESGGGVVQPGRSLRLSCAASGFTFSSYGMHWVRQAPGKGLEWVAVISYDGSNKYYADSVKGRFTISRDNSKNTLYLQMNSLRAEDTAVYYCARAGGHLFDYWGQGTLVTVSS

SEQ ID NO: 675 - protein, 107 aa, synthetic construct
  REGION 1..107: note = Description of Artificial Sequence: Synthetic polypeptide
  REGION 1..107: note = Synthetic Construct
EIVLTQSPATLSLSPGERATLSCRASQSVSSYLAWYQQKPGQAPRLLIYDASNRATGIPARFSGSGSGTDFTLTISSLEPEDFAVYYCQQDSSFPPTFGGGTKVEIK

SEQ ID NO: 676 - protein, 122 aa, synthetic construct
  REGION 1..122: note = Description of Artificial Sequence: Synthetic polypeptide
  REGION 1..122: note = Synthetic Construct
QVQLVESGGGVVQPGRSLRLSCAASGFTFSSYGMHWVRQAPGKGLEWVAVISYDGSNKYYADSVKGRFTISRDNSKNTLYLQMNSLRAEDTAVYYCARDRGGEYVDFAFDIWGQGTMVTVSS

SEQ ID NO: 677 - protein, 107 aa, synthetic construct
  REGION 1..107: note = Description of Artificial Sequence: Synthetic polypeptide
  REGION 1..107: note = Synthetic Construct
DIQMTQSPSSLSASVGDRVTITCRASQSISSYLNWYQQKPGKAPKLLIYAASSLQSGVPSRFSGSGSGTDFTLTISSLQPEDFATYYCQQSDFPPWTFGGGTKVEIK

SEQ ID NO: 678 - protein, 122 aa, synthetic construct
  REGION 1..122: note = Description of Artificial Sequence: Synthetic polypeptide
  REGION 1..122: note = Synthetic Construct
EVQLLESGGGLVQPGGSLRLSCAASGFTFSSYAMSWVRQAPGKGLEWVSAISGSGGSTYYADSVKGRFTISRDNSKNTLYLQMNSLRAEDTAVYYCARTRSGYGASNYFDYWGQGTLVTVSS

SEQ ID NO: 679 - protein, 107 aa, synthetic construct
  REGION 1..107: note = Description of Artificial Sequence: Synthetic polypeptide
  REGION 1..107: note = Synthetic Construct
DIQMTQSPSSLSASVGDRVTITCRASQSISSYLNWYQQKPGKAPKLLIYAASSLQSGVPSRFSGSGSGTDFTLTISSLQPEDFATYYCQQGYSAPITFGGGTKVEIK

SEQ ID NO: 680 - protein, 122 aa, synthetic construct
  REGION 1..122: note = Description of Artificial Sequence: Synthetic polypeptide
  REGION 1..122: note = Synthetic Construct
QVQLVESGGGVVQPGRSLRLSCAASGFTFSTYGMHWVRQAPGKGLEWVAVIWYDGSNKYYADSVKGRFTISRDNSKNTLYLQMNSLRAEDTAVYYCARGTGAAAASPAFDIWGQGTMVTVSS

SEQ ID NO: 681 - protein, 106 aa, synthetic construct
  REGION 1..106: note = Description of Artificial Sequence: Synthetic polypeptide
  REGION 1..106: note = Synthetic Construct
EIVLTQSPATLSLSPGERATLSCRASQSVSSYLAWYQQKPGQAPRLLIYDASNRATGIPARFSGSGSGTDFTLTISSLEPEDFAVYYCQQLFDWPTFGGGTKVEIK

SEQ ID NO: 682 - protein, 119 aa, synthetic construct
  REGION 1..119: note = Description of Artificial Sequence: Synthetic polypeptide
  REGION 1..119: note = Synthetic Construct
EVQLLESGGGLVQPGGSLRLSCAASGFTFSSYAMSWVRQAPGKGLEWVSAISGSGGSTYYADSVKGRFTISRDNSKNTLYLQMNSLRAEDTAVYYCARVGQYMLGMDVWGQGTTVTVSS

SEQ ID NO: 683 - protein, 106 aa, synthetic construct
  REGION 1..106: note = Description of Artificial Sequence: Synthetic polypeptide
  REGION 1..106: note = Synthetic Construct
EIVLTQSPATLSLSPGERATLSCRASQSVSSYLAWYQQKPGQAPRLLIYDASNRATGIPARFSGSGSGTDFTLTISSLEPEDFAVYYCQQRAFLFTFGGGTKVEIK

SEQ ID NO: 684 - protein, 125 aa, synthetic construct
  REGION 1..125: note = Description of Artificial Sequence: Synthetic polypeptide
  REGION 1..125: note = Synthetic Construct
QVQLVESGGGVVQPGRSLRLSCAASGFTFSTYGMHWVRQAPGKGLEWVAVIWYDGSNKYYADSVKGRFTISRDNSKNTLYLQMNSLRAEDTAVYYCARGAPVDYGGIEPEYFQHWGQGTLVTVSS

SEQ ID NO: 685 - protein, 107 aa, synthetic construct
  REGION 1..107: note = Description of Artificial Sequence: Synthetic polypeptide
  REGION 1..107: note = Synthetic Construct
EIVLTQSPATLSLSPGERATLSCRASQSVSSYLAWYQQKPGQAPRLLIYDASNRATGIPARFSGSGSGTDFTLTISSLEPEDFAVYYCQQIDFLPYTFGGGTKVEIK

SEQ ID NO: 686 - protein, 119 aa, synthetic construct
  REGION 1..119: note = Description of Artificial Sequence: Synthetic polypeptide
  REGION 1..119: note = Synthetic Construct
EVQLLESGGGLVQPGGSLRLSCAASGFTFSSYAMSWVRQAPGKGLEWVSAISGSGGSTYYADSVKGRFTISRDNSKNTLYLQMNSLRAEDTAVYYCAKHYHVGIAFDIWGQGTMVTVSS

SEQ ID NO: 687 - protein, 107 aa, synthetic construct
  REGION 1..107: note = Description of Artificial Sequence: Synthetic polypeptide
  REGION 1..107: note = Synthetic Construct
DIQMTQSPSSLSASVGDRVTITCRASQSISSYLNWYQQKPGKAPKLLIYAASSLQSGVPSRFSGSGSGTDFTLTISSLQPEDFATYYCQQVYSPPITFGGGTKVEIK

SEQ ID NO: 688 - protein, 107 aa, synthetic construct
  REGION 1..107: note = Description of Artificial Sequence: Synthetic polypeptide
  REGION 1..107: note = Synthetic Construct
DIQMTQSPSSLSASVGDRVTITCRASQSISSYLNWYQQKPGKAPKLLIYAASSLQSGVPSRFSGSGSGTDFTLTISSLQPEDFATYYCQQGYAAPITFGGGTKVEIK

SEQ ID NO: 689 - protein, 120 aa, synthetic construct
  REGION 1..120: note = Description of Artificial Sequence: Synthetic polypeptide
  REGION 1..120: note = Synthetic Construct
EVQLLESGGGLVQPGGSLRLSCAASGFTFSTYAMSWVRQAPGKGLEWVSAISGSGGSTYYADSVKGRFTISRDNSKNTLYLQMNSLRAEDTAVYYCARAMARKSVAFDIWGQGTMVTVSS

SEQ ID NO: 690 - protein, 107 aa, synthetic construct
  REGION 1..107: note = Description of Artificial Sequence: Synthetic polypeptide
  REGION 1..107: note = Synthetic Construct
EIVLTQSPATLSLSPGERATLSCRASQSVSSYLAWYQQKPGQAPRLLIYDASNRATGIPARFSGSGSGTDFTLTISSLEPEDFTVYYCQQRYALPITFGGGTKVEIK

SEQ ID NO: 691 - protein, 121 aa, synthetic construct
  REGION 1..121: note = Description of Artificial Sequence: Synthetic polypeptide
  REGION 1..121: note = Synthetic Construct
EVQLLESGGGLVQPGGSLRLSCAASGFTFSSSAMSWVRQAPGKGLEWVSAISGSGGSTYYADSVKGRFTISRDNSKNTLYLQMNSLRAEDTAVYYCAKVPSYQRGTAFDPWGQGTLVTVSS

SEQ ID NO: 692 - protein, 108 aa, synthetic construct
  REGION 1..108: note = Description of Artificial Sequence: Synthetic polypeptide
  REGION 1..108: note = Synthetic Construct
EIVLTQSPGTLSLSPGERATLSCRASQSVSSSYLAWYQQKPGQAPRLLIYGASSRATGIPDRFSGSGSGTDFTLTISRLEPEDFAVYYCQQYASPPITFGGGTKVEIK

SEQ ID NO: 693 - protein, 121 aa, synthetic construct
  REGION 1..121: note = Description of Artificial Sequence: Synthetic polypeptide
  REGION 1..121: note = Synthetic Construct
EVQLLESGGGLVQPGGSLRLSCAASGFTFSSSAMSWVRQAPGKGLEWVSAISGSGGSTYYADSVKGRFTISRDNSKNTLYLQMNSLRAEDTAVYYCAKSPAVAGIYRADYWGQGTLVTVSS

SEQ ID NO: 694 - protein, 107 aa, synthetic construct
  REGION 1..107: note = Description of Artificial Sequence: Synthetic polypeptide
  REGION 1..107: note = Synthetic Construct
DIQMTQSPSSLSASVGDRVTITCRASQSISRYLNWYQQKPGKAPKLLIYAASSLQSGVPSRFSGSGSGTDFTLTISSLQPEDFATYYCQQVYSTPITFGGGTKVEIK

SEQ ID NO: 695 - protein, 106 aa, synthetic construct
  REGION 1..106: note = Description of Artificial Sequence: Synthetic polypeptide
  REGION 1..106: note = Synthetic Construct
EIVMTQSPATLSLSPGERATLSCRASQSVSSYLAWYQQKPGQAPRLLIYDSSNRATGIPARFSGSGSGTDFTLTISSLEPEDFAVYYCQQLVHWPTFGGGTKVEIK

SEQ ID NO: 696 - protein, 124 aa, synthetic construct
  REGION 1..124: note = Description of Artificial Sequence: Synthetic polypeptide
  REGION 1..124: note = Synthetic Construct
QVQLVQSGAEVKKPGASVKVSCKASGYTFTSYYMHWVRQAPGQGLEWMGIINPSGGSTSYAQKFQGRVTMTRDTSTSTVYMELSSLRSEDTAVYYCARGPGYTTALDYYYMDVWGKGTTVTVSS

SEQ ID NO: 697 - protein, 106 aa, synthetic construct
  REGION 1..106: note = Description of Artificial Sequence: Synthetic polypeptide
  REGION 1..106: note = Synthetic Construct
EIVMTQSPATLSVSPGERATLSCRASQSVSSNLAWYQQKPGQAPRLLIYGASTRATGIPARFSGSGSGTEFTLTISSLQSEDFAVYYCQQLDDWFTFGGGTKVEIK

SEQ ID NO: 698 - protein, 116 aa, synthetic construct
  REGION 1..116: note = Description of Artificial Sequence: Synthetic polypeptide
  REGION 1..116: note = Synthetic Construct
QVQLVQSGAEVKKPGASVKVSCKASGYTFTSYYMHWVRQAPGQGLEWMGIINPSGGSTSYAQKFQGRVTMTRDTSTSTVYMELSSLRSEDTAVYYCARPAKTADYWGQGTLVTVSS

SEQ ID NO: 699 - protein, 107 aa, synthetic construct
  REGION 1..107: note = Description of Artificial Sequence: Synthetic polypeptide
  REGION 1..107: note = Synthetic Construct
EIVLTQSPATLSLSPGERATLSCRASQSVSSYLAWYQQKPGQAPRLLIYDSSNRATGIPARFSGSGSGTDFTLTISSLEPEDFAVYYCQQRSNYPITFGGGTKVEIK

SEQ ID NO: 700 - protein, 116 aa, synthetic construct
  REGION 1..116: note = Description of Artificial Sequence: Synthetic polypeptide
  REGION 1..116: note = Synthetic Construct
QVQLVQSGAEVKKPGASVKVSCKASGYTFTSYYMHWVRQAPGQGLEWMGIINPSGGSTTYAQKFQGRVTMTRDTSTSTVYMELSSLRSEDTAVYYCARPGKSMDVWGQGTTVTVSS

SEQ ID NO: 701 - protein, 107 aa, synthetic construct
  REGION 1..107: note = Description of Artificial Sequence: Synthetic polypeptide
  REGION 1..107: note = Synthetic Construct
EIVLTQSPGTLSLSPGERATLSCRASQSVSSYLAWYQQKPGQAPRLLIYDASNRATGIPARFSGSGSGTDFTLTISSLEPEDFAVYYCQQRILYPITFGGGTKVEIK

SEQ ID NO: 702 - protein, 107 aa, synthetic construct
  REGION 1..107: note = Description of Artificial Sequence: Synthetic polypeptide
  REGION 1..107: note = Synthetic Construct
EIVLTQSPATLSLSPGERATLSCRASQSVSSYLAWYQQKPGQAPRLLIYDASNRATGIPARFSGSGSGTDFTLTISSLEPEDFAVYYCQQRAAYPITFGGGTKVEIK

SEQ ID NO: 703 - protein, 107 aa, synthetic construct
  REGION 1..107: note = Description of Artificial Sequence: Synthetic polypeptide
  REGION 1..107: note = Synthetic Construct
EIVLTQSPATLSLSPGERATLSCRASQSVSSYLAWYQQKPGQAPRLLIYDASKRATGIPARFSGSGSGTDFTLTISSLEPEDFAVYYCQQRTSHPITFGGGTKVEIK

SEQ ID NO: 704 - protein, 108 aa, synthetic construct
  REGION 1..108: note = Description of Artificial Sequence: Synthetic polypeptide
  REGION 1..108: note = Synthetic Construct
EIVLTQSPGTLSLSPGERATLSCRASQSVSSSYLAWYQQKPGQAPRLLIYGASSRATGIPDRFSGSGSGTDFTLTISRLEPEDFAVYYCQQYAGSPFTFGGGTKVEIK

SEQ ID NO: 705 - protein, 121 aa, synthetic construct
  REGION 1..121: note = Description of Artificial Sequence: Synthetic polypeptide
  REGION 1..121: note = Synthetic Construct
QVQLVQSGAEVKKPGASVKVSCKASGYTFTSYYMHWVRQAPGQGLEWMGIINPSGGSTSYAQKFQGRVTMTRDTSTSTVYMELSSLRSEDTAVYYCARGVGGQDYYYMDVWGKGTTVTVSS

SEQ ID NO: 706 - protein, 106 aa, synthetic construct
  REGION 1..106: note = Description of Artificial Sequence: Synthetic polypeptide
  REGION 1..106: note = Synthetic Construct
DIQMTQSPSSLSASVGDRVTITCRASQSISSYLNWYQQKPGKAPKLLIYAASSLQSGVPSRFSGSGSGTDFTLTISSLQPEDFATYYCQQFDDVFTFGGGTKVEIK

SEQ ID NO: 707 - protein, 108 aa, synthetic construct
  REGION 1..108: note = Description of Artificial Sequence: Synthetic polypeptide
  REGION 1..108: note = Synthetic Construct
EIVLTQSPGTLSLSPGERATLSCRASQSVSSSYLAWYQQKPGQAPRLLIYGASSRATGIPDRFSGSGSGTDFTLTISRLEPEDFAVYYCQQYVNSPFTFGGGTKVEIK

SEQ ID NO: 708 - protein, 107 aa, synthetic construct
  REGION 1..107: note = Description of Artificial Sequence: Synthetic polypeptide
  REGION 1..107: note = Synthetic Construct
DIQMTQSPSSLSASVGDRVTITCRASQSINSYLNWYQQKPGKAPKLLIYAASSLQSGVPSRFSGSGSGTDFTLTISSLQPEDFATYYCQQSDDDPFTFGGGTKVEIK

SEQ ID NO: 709 - protein, 120 aa, synthetic construct
  REGION 1..120: note = Description of Artificial Sequence: Synthetic polypeptide
  REGION 1..120: note = Synthetic Construct
QVQLVQSGAEVKKPGASVKVSCKASGYTFTGSYMHWVRQAPGQGLEWMGWINPNSGGTNYAQKFQGRVTMTRDTSISTAYMELSRLRSDDTAVYYCARGPLYHPMIFDYWGQGTLVTVSS

SEQ ID NO: 710 - protein, 107 aa, synthetic construct
  REGION 1..107: note = Description of Artificial Sequence: Synthetic polypeptide
  REGION 1..107: note = Synthetic Construct
EIVLTQSPATLSLSPGERATLSCRASQSVSSYLAWYQQKPGQAPRLLIYDASNRATGIPARFSGSGSGTDFTLTISSLEPEDFAVYYCQQLSTYPLTFGGGTKVEIK

SEQ ID NO: 711 - protein, 115 aa, synthetic construct
  REGION 1..115: note = Description of Artificial Sequence: Synthetic polypeptide
  REGION 1..115: note = Synthetic Construct
QVQLVQSGAEVKKPGASVKVSCKASGYTFTGYYMHWVRQAPGQGLEWMGSINPNSGGTNYAQKFQGRVTMTRDTSISTAYMELSRLRSDDTAVYYCARASSVDNWGQGTLVTVSS

SEQ ID NO: 712 - protein, 107 aa, synthetic construct
  REGION 1..107: note = Description of Artificial Sequence: Synthetic polypeptide
  REGION 1..107: note = Synthetic Construct
EIVMTQSPATLSLSPGERATLSCRASQSVSSYLAWYQQKPGQAPRLLIYDASNRATGIPARFSGSGSGTDFTLTISSLEPEDFAVYYCQQRSVYPITFGGGTKVEIK

SEQ ID NO: 713 - protein, 126 aa, synthetic construct
  REGION 1..126: note = Description of Artificial Sequence: Synthetic polypeptide
  REGION 1..126: note = Synthetic Construct
QVQLVQSGAEVKKPGASVKVSCKASGYTFTNYGISWVRQAPGQGLEWMGWISAYNGNTNYAQKLQGRVTMTTDTSTSTAYMELRSLRSDDTAVYYCARGPTKAYYGSGSYVVFDPWGQGTLVTVSS

SEQ ID NO: 714 - protein, 107 aa, synthetic construct
  REGION 1..107: note = Description of Artificial Sequence: Synthetic polypeptide
  REGION 1..107: note = Synthetic Construct
EIVLTQSPATLSLSPGERATLSCRASQSVSSYLAWYQQKPGQAPRLLIYDASKRATGIPARFSGSGSGTDFTLTISSLEPEDFAVYYCQQVSLFPLTFGGGTKVEIK

SEQ ID NO: 715 - protein, 122 aa, synthetic construct
  REGION 1..122: note = Description of Artificial Sequence: Synthetic polypeptide
  REGION 1..122: note = Synthetic Construct
EVQLVQSGAEVKKPGESLKISCKGSGYSFTSYWIGWVRQMPGKGLEWMGIIYPGDSDTRYSPSFQGQVTISADKSISTAYLQWSSLKASDTAMYYCARLGIYSTGATAFDIWGQGTMVTVSS

SEQ ID NO: 716 - protein, 108 aa, synthetic construct
  REGION 1..108: note = Description of Artificial Sequence: Synthetic polypeptide
  REGION 1..108: note = Synthetic Construct
DIQMTQSPSTLSASVGDRVTITCRASQSISSWLAWYQQKPGKAPKLLIYDASSLESGVPSRFSGSGSGTEFTLTISSLQPDDFATYYCLDYNSYSPITFGGGTKVEIK

SEQ ID NO: 717 - protein, 119 aa, synthetic construct
  REGION 1..119: note = Description of Artificial Sequence: Synthetic polypeptide
  REGION 1..119: note = Synthetic Construct
QVQLVQSGAEVKKPGASVKVSCKASGYTFTGSYMHWVRQAPGQGLEWMGWINPNSGGTNYAQKFQGRVTMTRDTSISTAYMELSRLRSDDTAVYYCARGGVWYSLFDIWGQGTMVTVSS

SEQ ID NO: 718 - protein, 107 aa, synthetic construct
  REGION 1..107: note = Description of Artificial Sequence: Synthetic polypeptide
  REGION 1..107: note = Synthetic Construct
DIQMTQSPSSLSASVGDRVTITCQASQDISNYLNWYQQKPGKAPKLLIYDASNLETGVPSRFSGSGSGTDFTFTISSLQPEDIATYYCQQHIALPFTFGGGTKVEIK

SEQ ID NO: 719 - protein, 116 aa, synthetic construct
  REGION 1..116: note = Description of Artificial Sequence: Synthetic polypeptide
  REGION 1..116: note = Synthetic Construct
QVQLVQSGAEVKKPGASVKVSCKASGYTFTGYYMHWVRQAPGQGLEWMGWINPNSGGTSYAQKFQGRVTMTRDTSISTAYMELSRLRSDDTAVYYCARASKMGDDWGQGTLVTVSS

SEQ ID NO: 720 - protein, 107 aa, synthetic construct
  REGION 1..107: note = Description of Artificial Sequence: Synthetic polypeptide
  REGION 1..107: note = Synthetic Construct
EIVLTQSPATLSLSPGERATLSCRASQSVSSYLAWYQQKPGQAPRLLIYDASKRATGIPARFSGSGSGTDFTLTISSLEPEDFAVYYCQQRASMPITFGGGTKVEIK

SEQ ID NO: 721 - protein, 120 aa, synthetic construct
  REGION 1..120: note = Description of Artificial Sequence: Synthetic polypeptide
  REGION 1..120: note = Synthetic Construct
QVQLVQSGAEVKKPGASVKVSCKASGYTFTSYGIHWVRQAPGQGLEWMGWISAYNGNTNYAQKLQGRVTMTTDTSTSTAYMELRSLRSDDTAVYYCARGGVPRVSYFQHWGQGTLVTVSS

SEQ ID NO: 722 - protein, 107 aa, synthetic construct
  REGION 1..107: note = Description of Artificial Sequence: Synthetic polypeptide
  REGION 1..107: note = Synthetic Construct
EIVLTQSPATLSLSPGERATLSCRASQSVSSYLAWYQQKPGQAPRLLIYDSSNRATGIPARFSGSGSGTDFTLTISSLEPEDFAVYYCQQAFNRPPTFGGGTKVEIK

SEQ ID NO: 723 - protein, 123 aa, synthetic construct
  REGION 1..123: note = Description of Artificial Sequence: Synthetic polypeptide
  REGION 1..123: note = Synthetic Construct
EVQLVQSGAEVKKPGESLKISCKGSGYSFTSYWIGWVRQMPGKGLEWMGIIYPGDSDTRYSPSFQGQVTISADKSISTAYLQWSSLKASDTAMYYCARAGHYDDWSGLGLDVWGQGTMVTVSS

SEQ ID NO: 724 - protein, 107 aa, synthetic construct
  REGION 1..107: note = Description of Artificial Sequence: Synthetic polypeptide
  REGION 1..107: note = Synthetic Construct
EIVLTQSPATLSLSPGERATLSCRASQSVSSYLAWYQQKPGQAPRLLIYDASKRATGIPARFSGSGSGTDFTLTISSLEPEDFAVYYCQQSSVHPYTFGGGTKVEIK

SEQ ID NO: 725 - protein, 120 aa, synthetic construct
  REGION 1..120: note = Description of Artificial Sequence: Synthetic polypeptide
  REGION 1..120: note = Synthetic Construct
QVQLVQSGAEVKKPGASVKVSCKASGYTFTSYGISWVRQAPGQGLEWMGWISTYNGNTNYAQKLQGRVTMTTDTSTSTAYMELRSLRSDDTAVYYCARGSGSGYDSWYDWGQGTLVTVSS

SEQ ID NO: 726 - protein, 107 aa, synthetic construct
  REGION 1..107: note = Description of Artificial Sequence: Synthetic polypeptide
  REGION 1..107: note = Synthetic Construct
DIQMTQSPSSVSASVGDRVTITCRASQGIDSWLAWYQQKPGKAPKLLIYAASSLQSGVPSRFSGSGSGTDFTLTISSLQPEDFATYYCQQAYSLPPTFGGGTKVEIK

SEQ ID NO: 727 - protein, 122 aa, synthetic construct
  REGION 1..122: note = Description of Artificial Sequence: Synthetic polypeptide
  REGION 1..122: note = Synthetic Construct
EVQLVQSGAEVKKPGESLKISCKGSGYSFTSYWIGWVRQMPGKGLEWMGIIYPGDSDTRYSPSFQGQVTISADKSISTAYLQWSSLKASDTAMYYCARLGRWSSGSTAFDIWGQGTMVTVSS

SEQ ID NO: 728 - protein, 106 aa, synthetic construct
  REGION 1..106: note = Description of Artificial Sequence: Synthetic polypeptide
  REGION 1..106: note = Synthetic Construct
EIVMTQSPATLSVSPGERATLSCRASQSVSSNLAWYQQKPGQAPRLLIYGASTRATGIPARFSGSGSGTEFTLTISSLQSEDFAVYYCQQDDDGYTFGGGTKVEIK

SEQ ID NO: 729 - protein, 122 aa, synthetic construct
  REGION 1..122: note = Description of Artificial Sequence: Synthetic polypeptide
  REGION 1..122: note = Synthetic Construct
EVQLVQSGAEVKKPGESLKISCKGSGYSFTSYWIGWVRQMPGKGLEWMGIIYPGDSDTRYSPSFQGQVTISADKSISTAYLQWSSLKASDTAMYYCARLGRKPSGSVAFDIWGQGTMVTVSS

SEQ ID NO: 730 - protein, 107 aa, synthetic construct
  REGION 1..107: note = Description of Artificial Sequence: Synthetic polypeptide
  REGION 1..107: note = Synthetic Construct
EIVLTQSPATLSLSPGERATLSCRASQSVSSYLAWYQQKPGQAPRLLIYDASNRATGIPARFSGSGSGTDFTLTISSLEPEDFAVYYCQQDYSWPYTFGGGTKVEIK

SEQ ID NO: 731 - protein, 117 aa, synthetic construct
  REGION 1..117: note = Description of Artificial Sequence: Synthetic polypeptide
  REGION 1..117: note = Synthetic Construct
QVQLVQSGAEVKKPGASVKVSCKASGYTFTGSYMHWVRQAPGQGLEWMGWINPNSGGTNYAQKFQGRVTMTRDTSISTAYMELSRLRSDDTAVYYCARAGHKTHDYWGQGTLVTVSS

SEQ ID NO: 732 - protein, 107 aa, synthetic construct
  REGION 1..107: note = Description of Artificial Sequence: Synthetic polypeptide
  REGION 1..107: note = Synthetic Construct
EIVLTQSPGTLSLSPGERATLSCRASQSVSSYLAWYQQKPGQAPRLLIYDASNRATGIPARFSGSGSGTDFTLTISSLEPEDFAVYYCQQRSAYPITFGGGTKVEIK

SEQ ID NO: 733 - protein, 107 aa, synthetic construct
  REGION 1..107: note = Description of Artificial Sequence: Synthetic polypeptide
  REGION 1..107: note = Synthetic Construct
EIVLTQSPATLSLSPGERATLSCRASQSVSSYLAWYQQKPGQAPRLLIYDASNRATGIPARFSGSGSGTDFTLTISSLEPEDFAVYYCQQRSHFPITFGGGTKVEIK

SEQ ID NO: 734 - protein, 116 aa, synthetic construct
  REGION 1..116: note = Description of Artificial Sequence: Synthetic polypeptide
  REGION 1..116: note = Synthetic Construct
QVQLVESGGGVVQPGRSLRLSCAASGFTFSSYGMHWVRQAPGKGLEWVALIWYDGSNKYYADSVKGRFTISRDNSKNTLYLQMNSLRAEDTAVYYCAKPGSMTDYWGQGTLVTVSS

SEQ ID NO: 735 - protein, 107 aa, synthetic construct
  REGION 1..107: note = Description of Artificial Sequence: Synthetic polypeptide
  REGION 1..107: note = Synthetic Construct
EIVLTQSPATLSLSPGERATLSCRASQSVSSYLAWYQQKPGQAPRLLIYDASNRATGIPARFSGSGSGTDFTLTISSLEPEDFAVYYCQQRANYPITFGGGTKVEIK

SEQ ID NO: 736 - protein, 117 aa, synthetic construct
  REGION 1..117: note = Description of Artificial Sequence: Synthetic polypeptide
  REGION 1..117: note = Synthetic Construct
QVQLVQSGAEVKKPGASVKVSCKASGYTFTGSYMHWVRQAPGQGLEWMGWINPNSGGTNYAQKFQGRVTMTRDTSISTAYMELSRLRSDDTAVYYCARAKSVDHDYWGQGTLVTVSS

SEQ ID NO: 737 - protein, 107 aa, synthetic construct
  REGION 1..107: note = Description of Artificial Sequence: Synthetic polypeptide
  REGION 1..107: note = Synthetic Construct
EIVLTQSPATLSLSPGERATLSCRASQSVSSYLAWYQQKPGQAPRLLIYDASNRATGIPARFSGSGSGTDFTLTISSLEPEDFAVYYCQQRADYPITFGGGTKVEIK

SEQ ID NO: 738 - protein, 107 aa, synthetic construct
  REGION 1..107: note = Description of Artificial Sequence: Synthetic polypeptide
  REGION 1..107: note = Synthetic Construct
EIVLTQSPATLSLSPGERATLSCRASQSVSSYLAWYQQKPGQAPRLLIYDASNRATGIPARFSGSGSGTDFTLTISSLEPEDFAVYYCQQRSVYPITFGGGTKVEIK

SEQ ID NO: 739 - protein, 122 aa, synthetic construct
  REGION 1..122: note = Description of Artificial Sequence: Synthetic polypeptide
  REGION 1..122: note = Synthetic Construct
QVQLVQSGAEVKKPGASVKVSCKASGYTFTSYYMHWVRQAPGQGLEWMGIINPSGGSTSYAQKFQGRVTMTRDTSTSTVYMELSSLRSEDTAVYYCARDISTHDYDLAFDIWGQGTMVTVSS

SEQ ID NO: 740 - protein, 108 aa, synthetic construct
  REGION 1..108: note = Description of Artificial Sequence: Synthetic polypeptide
  REGION 1..108: note = Synthetic Construct
EIVMTQSPGTLSLSPGERATLSCRASQSVSSSYLAWYQQKPGQAPRLLIYGASNRATGIPDRFSGSGSGTDFTLTISRLEPEDFAVYYCQQAGSHPFTFGGGTKVEIK

SEQ ID NO: 741 - protein, 117 aa, synthetic construct
  REGION 1..117: note = Description of Artificial Sequence: Synthetic polypeptide
  REGION 1..117: note = Synthetic Construct
QVQLQESGPGLVKPSETLSLTCTVSGGSISSYYWSWIRQPPGKGLEWIGSIYYSGSTNYNPSLKSRVTISVDTSKNQFSLKLSSVTAADTAVYYCARSGTETLFDYWGQGTLVTVSS

SEQ ID NO: 742 - protein, 107 aa, synthetic construct
  REGION 1..107: note = Description of Artificial Sequence: Synthetic polypeptide
  REGION 1..107: note = Synthetic Construct
DIQMTQSPSSLSASVGDRVTITCQASQDITNYLNWYQQKPGKAPKLLIYDASNLETGVPSRFSGSRSGTDFTFTISSLQPEDIATYYCQQDVNYPPTFGGGTKVEIK

SEQ ID NO: 743 - protein, 121 aa, synthetic construct
  REGION 1..121: note = Description of Artificial Sequence: Synthetic polypeptide
  REGION 1..121: note = Synthetic Construct
EVQLVQSGAEVKKPGESLKISCKGSGYSFTSYWIGWVRQMPGKGLEWMGIIYPGDSDTTYSPSFQGQVTISADKSISTAYLQWSSLKASDTAMYYCARAKMLDDGYAFDIWGQGTMVTVSS

SEQ ID NO: 744 - protein, 107 aa, synthetic construct
  REGION 1..107: note = Description of Artificial Sequence: Synthetic polypeptide
  REGION 1..107: note = Synthetic Construct
EIVMTQSPATLSVSPGERATLSCRASQSVSSNLAWYQQKPGQAPRLLIYGASTRATGIPARFSGSGSGTEFTLTISSLQSEDFAVYYCQQDDNYPYTFGGGTKVEIK

SEQ ID NO: 745 - protein, 107 aa, synthetic construct
  REGION 1..107: note = Description of Artificial Sequence: Synthetic polypeptide
  REGION 1..107: note = Synthetic Construct
EIVLTQSPATLSLSPGERATLSCRASQSVSSYLAWYQQKPGQAPRLLIYDASNRATGIPARFSGSGSGTDFTLTISSLEPEDFAVYYCQQRSTFPITFGGGTKVEIK

SEQ ID NO: 746 - protein, 121 aa, synthetic construct
  REGION 1..121: note = Description of Artificial Sequence: Synthetic polypeptide
  REGION 1..121: note = Synthetic Construct
QVQLVQSGAEVKKPGASVKVSCKASGYTFTGYYMHWVRQAPGQGLEWMGWINPNSGGTNYAQKFQGRVTMTRDTSISTAYMELSRLRSDDTAVYYCARDLGYSSLLALDIWGQGTMVTVSS

SEQ ID NO: 747 - protein, 107 aa, synthetic construct
  REGION 1..107: note = Description of Artificial Sequence: Synthetic polypeptide
  REGION 1..107: note = Synthetic Construct
EIVLTQSPATLSLSPGERATLSCRASQSVSSYLAWYQQKPGQAPRLLIYDASNRATGIPARFSGSGSGTDFTLTISSLEPEDFAVYYCQQVSNYPFTFGGGTKVEIK

SEQ ID NO: 748 - protein, 122 aa, synthetic construct
  REGION 1..122: note = Description of Artificial Sequence: Synthetic polypeptide
  REGION 1..122: note = Synthetic Construct
EVQLVESGGGLVKPGGSLRLSCAASGFTFSSYSMNWVRQAPGKGLEWVSSISSSSSYIYYADSVKGRFTISRDNAKNSLYLQMNSLRAEDTAVYYCARGGGRRGDNNWFDPWGQGTLVTVSS

SEQ ID NO: 749 - protein, 113 aa, synthetic construct
  REGION 1..113: note = Description of Artificial Sequence: Synthetic polypeptide
  REGION 1..113: note = Synthetic Construct
DIVMTQSPDSLAVSLGERATINCKSSQSVLYSSNNKNYLAWYQQKPGQPPKLLIYWASTRESGVPDRFSGSGSGTDFTLTISSLQAEDVAVYYCQQYHDAPITFGGGTKVEIK

SEQ ID NO: 750 - protein, 117 aa, synthetic construct
  REGION 1..117: note = Description of Artificial Sequence: Synthetic polypeptide
  REGION 1..117: note = Synthetic Construct
QVQLVESGGGVVQPGRSLRLSCAASGFTFSSYGMHWVRQAPGKGLEWVAVISYDGSNKYYADSVKGRFTISRDNSKNTLYLQMNSLRAEDTAVYYCARGPPHEMDYWGQGTLVTVSS

SEQ ID NO: 751 - protein, 113 aa, synthetic construct
  REGION 1..113: note = Description of Artificial Sequence: Synthetic polypeptide
  REGION 1..113: note = Synthetic Construct
DIVMTQSPDSLAVSLGERATINCKSSQSVLYSSNNKNYLAWYQQKPGQPPKLLIYWASTRESGVPDRFSGSGSGTDFTLTISSLQAEDVAVYYCQQAYVVPPTFGGGTKVEIK

SEQ ID NO: 752 - protein, 119 aa, synthetic construct
  REGION 1..119: note = Description of Artificial Sequence: Synthetic polypeptide
  REGION 1..119: note = Synthetic Construct
QVQLVESGGGVVQPGRSLRLSCAASGFTFSSYGMHWVRQAPGKGLEWVAVIWYDGSNKYYADSVKGRFTISRDNSKNTLYLQMNSLRAEDTAVYYCARTPYPWIYFDLWGRGTLVTVSS

SEQ ID NO: 753 - protein, 107 aa, synthetic construct
  REGION 1..107: note = Description of Artificial Sequence: Synthetic polypeptide
  REGION 1..107: note = Synthetic Construct
EIVLTQSPATLSLSPGERATLSCRASQSVSSYLAWYQQKPGQAPRLLIYDASNRATGIPARFSGSGSGTDFTLTISSLEPEDFAVYYCQQADNWPFTFGGGTKVEIK

SEQ ID NO: 754 - protein, 120 aa, synthetic construct
  REGION 1..120: note = Description of Artificial Sequence: Synthetic polypeptide
  REGION 1..120: note = Synthetic Construct
EVQLVESGGGLVQPGGSLRLSCAASGFTFSSYSMNWVRQAPGKGLEWVSYISGSSSTIYYADSVKGRFTISRDNAKNSLYLQMNSLRAEDTAVYYCARGGRRHYGGMDVWGQGTTVTVSS

SEQ ID NO: 755 - protein, 112 aa, synthetic construct
  REGION 1..112: note = Description of Artificial Sequence: Synthetic polypeptide
  REGION 1..112: note = Synthetic Construct
DIVMTQSPLSLPVTPGEPASISCRSSQSLLHSNGYNYLDWYLQKPGQSPQLLIYLGSHRASGVPDRFSGSGSGTDFTLKISRVEAEDVGVYYCMQALESPRTFGGGTKVEIK

SEQ ID NO: 756 - protein, 122 aa, synthetic construct
  REGION 1..122: note = Description of Artificial Sequence: Synthetic polypeptide
  REGION 1..122: note = Synthetic Construct
QVQLVQSGAEVKKPGSSVKVSCKASGGTFSSYAISWVRQAPGQGLEWMGGIIPIFGTANYAQKFQGRVTITADESTSTAYMELSSLRSEDTAVYYCARGGGTFWSGSWALYWGQGTLVTVSS

SEQ ID NO: 757 - protein, 107 aa, synthetic construct
  REGION 1..107: note = Description of Artificial Sequence: Synthetic polypeptide
  REGION 1..107: note = Synthetic Construct
EIVLTQSPATLSLSPGERATLSCRASQSVSSYLAWYQQKPGQAPRLLIYDASNRATGIPARFSGSGSGTDFTLTISSLEPEDFAVYYCQQYVNWPFTFGGGTKVEIK

SEQ ID NO: 758 - protein, 123 aa, synthetic construct
  REGION 1..123: note = Description of Artificial Sequence: Synthetic polypeptide
  REGION 1..123: note = Synthetic Construct
QVQLVQSGAEVKKPGSSVKVSCKASGGTFSSYAISWVRQAPGQGLEWMGGIIPIFGTANYAQKFQGRVTITADESTSTAYMELSSLRSEDTAVYYCARDSGNYDYWSGALRYWGQGTLVTVSS

SEQ ID NO: 759 - protein, 107 aa, synthetic construct
  REGION 1..107: note = Description of Artificial Sequence: Synthetic polypeptide
  REGION 1..107: note = Synthetic Construct
EIVLTQSPATLSLSPGERATLSCRASQSVSSYLAWYQQKPGQAPRLLIYDASNRATGIPARFSGSGSGTDFTLTISSLEPEDFAVYYCQQSSNWPWTFGGGTKVEIK

SEQ ID NO: 760 - protein, 118 aa, synthetic construct
  REGION 1..118: note = Description of Artificial Sequence: Synthetic polypeptide
  REGION 1..118: note = Synthetic Construct
QVQLQESGPGLVKPSQTLSLTCTVSGGSISSGGYYWSWIRQHPGKGLEWIGYIYYSGSTVYNPSLKSRVTISVDTSKNQFSLKLSSVTAADTAVYYCARVSSSWYKAWGQGTMVTVSS

SEQ ID NO: 761 - protein, 107 aa, synthetic construct
  REGION 1..107: note = Description of Artificial Sequence: Synthetic polypeptide
  REGION 1..107: note = Synthetic Construct
DIQMTQSPSSVSASVGDRVTITCRASQGISSWLAWYQQKPGKAPKLLIYAASSLQSGVPSRFSGSGSGTDFTLTISSLQPEDFATYYCQQASTFPITFGGGTKVEIK

SEQ ID NO: 762 - protein, 123 aa, synthetic construct
  REGION 1..123: note = Description of Artificial Sequence: Synthetic polypeptide
  REGION 1..123: note = Synthetic Construct
QVQLQQWGAGLLKPSETLSLTCAVYGGSFSGYYWSWIRQPPGKGLEWIGEIDHSGSTKYNPSLKSRVTISVDTSKNQFSLKLSSVTAADTAVYYCARVGVVVGRPGYSAFDIWGQGTMVTVSS

SEQ ID NO: 763 - protein, 107 aa, synthetic construct
  REGION 1..107: note = Description of Artificial Sequence: Synthetic polypeptide
  REGION 1..107: note = Synthetic Construct
DIQMTQSPSSVSASVGDRVTITCRASQGISSWLAWYQQKPGKAPKLLIYAASSLQSGVPSRFSGSGSGTDFTLTISSLQPEDFATYYCQQRNSLPLTFGGGTKVEIK

SEQ ID NO: 764 - protein, 107 aa, synthetic construct
  REGION 1..107: note = Description of Artificial Sequence: Synthetic polypeptide
  REGION 1..107: note = Synthetic Construct
DIQMTQSPSSLSASVGDRVTITCRASQSISSYLNWYQQKPGKAPKLLIYAASSLQSGVPSRFSGSGSGTDFTLTISSLQPEDFATYYCQQSYDFPITFGGGTKVEIK

SEQ ID NO: 765 - protein, 124 aa, synthetic construct
  REGION 1..124: note = Description of Artificial Sequence: Synthetic polypeptide
  REGION 1..124: note = Synthetic Construct
QVQLVESGGGVVQPGRSLRLSCAASGFTFSSYGMHWVRQAPGKGLEWVAVIWYDGSNKYYADSVKGRFTISRDNSKNTLYLQMNSLRAEDTAVYYCAKDLGGYYGGAAYGMDVWGQGTTVTVSS

SEQ ID NO: 766 - protein, 108 aa, synthetic construct
  REGION 1..108: note = Description of Artificial Sequence: Synthetic polypeptide
  REGION 1..108: note = Synthetic Construct
DIQLTQSPSSVSASVGDRVTITCRASQDISSWLAWYQQKPGKAPKLLIYAASSLQSGVPSRFSGSGSGTDFTLTISSLQPEDFATYYCQQEVDYPPLTFGGGTKVEIK

SEQ ID NO: 767 - protein, 122 aa, synthetic construct
  REGION 1..122: note = Description of Artificial Sequence: Synthetic polypeptide
  REGION 1..122: note = Synthetic Construct
QVQLVESGGGVVQPGRSLRLSCAASGFTFSSYGMHWVRQAPGKGLEWVAVISYDGSNKYYADSVKGRFTISRDNSKNTLYLQMNSLRAEDTAVYYCAKDGVYYGLGNWFDPWGQGTLVTVSS

SEQ ID NO: 768 - protein, 107 aa, synthetic construct
  REGION 1..107: note = Description of Artificial Sequence: Synthetic polypeptide
  REGION 1..107: note = Synthetic Construct
DIQMTQSPSTLSASVGDRVTITCRASQSISSWLAWYQQKPGKAPKLLIYKASSLESGVPSRFSGSGSGTEFTLTISSLQPDDFATYYCQQLNSYSPTFGGGTKVEIK

SEQ ID NO: 769 - protein, 119 aa, synthetic construct
  REGION 1..119: note = Description of Artificial Sequence: Synthetic polypeptide
  REGION 1..119: note = Synthetic Construct
QVQLQESGPGLVKPSETLSLTCTVSGGSISSYYWSWIRQPPGKGLEWIGSIYYSGSTNYNPSLKSRVTISVDTSKNQFSLKLSSVTAADTAVYYCARHGWDRVGWFDPWGQGTLVTVSS

SEQ ID NO: 770 - protein, 107 aa, synthetic construct
  REGION 1..107: note = Description of Artificial Sequence: Synthetic polypeptide
  REGION 1..107: note = Synthetic Construct
EIVLTQSPATLSLSPGERATLSCRASQSVSRYLAWYQQKPGQAPRLLIYDASNRATGIPARFSGSGSGTDFTLTISSLEPEDFAVYYCQQYIFWPPTFGGGTKVEIK

SEQ ID NO: 771 - protein, 110 aa, synthetic construct; identical to SEQ ID NO: 207
  REGION 1..110: note = Description of Artificial Sequence: Synthetic polypeptide
  REGION 1..110: note = Synthetic Construct

SEQ ID NO: 772 - protein, 9 aa, synthetic construct
  REGION 1..9: note = Description of Artificial Sequence: Synthetic peptide
  REGION 1..9: note = Synthetic Construct
YTFTSYYIH

SEQ ID NO: 773 - protein, 17 aa, synthetic construct
  REGION 1..17: note = Description of Artificial Sequence: Synthetic peptide
  REGION 1..17: note = Synthetic Construct
IINPSGGSTSYAQKFQG

SEQ ID NO: 774 - protein, 16 aa, synthetic construct
  REGION 1..16: note = Description of Artificial Sequence: Synthetic peptide
  REGION 1..16: note = Synthetic Construct
AREADDSSGYPLGLDV

SEQ ID NO: 775 - protein, 11 aa, synthetic construct
  REGION 1..11: note = Description of Artificial Sequence: Synthetic peptide
  REGION 1..11: note = Synthetic Construct
RASQSVSSNLA

SEQ ID NO: 776 - protein, 7 aa, synthetic construct
  REGION 1..7: note = Description of Artificial Sequence: Synthetic peptide
  REGION 1..7: note = Synthetic Construct
GASTRAT

SEQ ID NO: 777 - protein, 9 aa, synthetic construct
  REGION 1..9: note = Description of Artificial Sequence: Synthetic peptide
  REGION 1..9: note = Synthetic Construct
QQVNSLPPT

SEQ ID NO: 778 - protein, 9 aa, synthetic construct
  REGION 1..9: note = Description of Artificial Sequence: Synthetic peptide
  REGION 1..9: note = Synthetic Construct
YSFTTYWIG

SEQ ID NO: 779 - protein, 17 aa, synthetic construct
  REGION 1..17: note = Description of Artificial Sequence: Synthetic peptide
  REGION 1..17: note = Synthetic Construct
IIYPGDSDTRYSPSFQG

SEQ ID NO: 780 - protein, 15 aa, synthetic construct
  REGION 1..15: note = Description of Artificial Sequence: Synthetic peptide
  REGION 1..15: note = Synthetic Construct
ARAGHYDGGHLGMDV

SEQ ID NO: 781 - protein, 12 aa, synthetic construct
  REGION 1..12: note = Description of Artificial Sequence: Synthetic peptide
  REGION 1..12: note = Synthetic Construct
RASQSVSSSYLA

SEQ ID NO: 782 - protein, 7 aa, synthetic construct
  REGION 1..7: note = Description of Artificial Sequence: Synthetic peptide
  REGION 1..7: note = Synthetic Construct
GASNRAT

SEQ ID NO: 783 - protein, 9 aa, synthetic construct
  REGION 1..9: note = Description of Artificial Sequence: Synthetic peptide
  REGION 1..9: note = Synthetic Construct
QQDDSAPYT

SEQ ID NO: 784 - protein, 122 aa, synthetic construct; identical to SEQ ID NO: 636
  REGION 1..122: note = Description of Artificial Sequence: Synthetic polypeptide
  REGION 1..122: note = Synthetic Construct

SEQ ID NO: 785 - protein, 108 aa, synthetic construct
  REGION 1..108: note = Description of Artificial Sequence: Synthetic polypeptide
  REGION 1..108: note = Synthetic Construct
EIVMTQSPGTLSLSPGERATLSCRASQSVSSSYLAWYQQKPGQAPRLLIYGASNRATGIPDRFSGSGSGTDFTLTISRLEPEDFAVYYCQQDDSAPYTFGGGTKVEIK

SEQ ID NO: 786 - protein, 123 aa, synthetic construct
  REGION 1..123: note = Description of Artificial Sequence: Synthetic polypeptide
  REGION 1..123: note = Synthetic Construct
QVQLVQSGAEVKKPGASVKVSCKASGYTFTSYYIHWVRQAPGQGLEWMGIINPSGGSTSYAQKFQGRVTMTRDTSTSTVYMELSSLRSEDTAVYYCAREADDSSGYPLGLDVWGQGTMVTVSS

SEQ ID NO: 787 - protein, 107 aa, synthetic construct
  REGION 1..107: note = Description of Artificial Sequence: Synthetic polypeptide
  REGION 1..107: note = Synthetic Construct
EIVMTQSPATLSVSPGERATLSCRASQSVSSNLAWYQQKPGQAPRLLIYGASTRATGIPARFSGSGSGTEFTLTISSLQSEDFAVYYCQQVNSLPPTFGGGTKVEIK

SEQ ID NO: 788 - protein, 17 aa, synthetic construct
  REGION 1..17: note = Description of Artificial Sequence: Synthetic peptide
  REGION 1..17: note = Synthetic Construct
LQVTDSGLYRCVIYHPP

SEQ ID NO: 789 - protein, 21 aa, synthetic construct
  REGION 1..21: note = Description of Artificial Sequence: Synthetic peptide
  REGION 1..21: note = Synthetic Construct
MEVGWYRSPFSRVVHLYRNGK

SEQ ID NO: 790 - DNA, 21 bp, synthetic construct
  misc_feature 1..21: note = Description of Artificial Sequence: Synthetic oligonucleotide
  misc_feature 1..21: note = Synthetic Construct
  source 1..21: mol_type = other DNA
ctccactcacggcaaattcaa

SEQ ID NO: 791 - DNA, 22 bp, synthetic construct
  misc_feature 1..22: note = Description of Artificial Sequence: Synthetic oligonucleotide
  misc_feature 1..22: note = Synthetic Construct
  source 1..22: mol_type = other DNA
gatgacaagcttcccattctcg

SEQ ID NO: 792 - DNA, 21 bp, synthetic construct
  misc_feature 1..21: note = Description of Artificial Sequence: Synthetic oligonucleotide
  misc_feature 1..21: note = Synthetic Construct
  source 1..21: mol_type = other DNA
ccgtcagccgatttgctatct

SEQ ID NO: 793 - DNA, 22 bp, synthetic construct
  misc_feature 1..22: note = Description of Artificial Sequence: Synthetic oligonucleotide
  misc_feature 1..22: note = Synthetic Construct
  source 1..22: mol_type = other DNA
acggcagagaggaggttgactt

SEQ ID NO: 794 - DNA, 22 bp, synthetic construct
  misc_feature 1..22: note = Description of Artificial Sequence: Synthetic oligonucleotide
  misc_feature 1..22: note = Synthetic Construct
  source 1..22: mol_type = other DNA
acaacaaaaaagcctcgtgctg

SEQ ID NO: 795 - DNA, 22 bp, synthetic construct
  misc_feature 1..22: note = Description of Artificial Sequence: Synthetic oligonucleotide
  misc_feature 1..22: note = Synthetic Construct
  source 1..22: mol_type = other DNA
ccattgaggtggagagctttca

SEQ ID NO: 796 - DNA, 22 bp, synthetic construct
  misc_feature 1..22: note = Description of Artificial Sequence: Synthetic oligonucleotide
  misc_feature 1..22: note = Synthetic Construct
  source 1..22: mol_type = other DNA
ggcaaacccaaggtctacgttc

SEQ ID NO: 797 - DNA, 21 bp, synthetic construct
  misc_feature 1..21: note = Description of Artificial Sequence: Synthetic oligonucleotide
  misc_feature 1..21: note = Synthetic Construct
  source 1..21: mol_type = other DNA
tacctcattggccagctgctt

SEQ ID NO: 798 - DNA, 20 bp, synthetic construct
  misc_feature 1..20: note = Description of Artificial Sequence: Synthetic oligonucleotide
  misc_feature 1..20: note = Synthetic Construct
  source 1..20: mol_type = other DNA
aggacctgggttggaagtgg

SEQ ID NO: 799 - DNA, 20 bp, synthetic construct
  misc_feature 1..20: note = Description of Artificial Sequence: Synthetic oligonucleotide
  misc_feature 1..20: note = Synthetic Construct
  source 1..20: mol_type = other DNA
agttggcatggtagcccttg

SEQ ID NO: 800 - protein, 132 aa, Homo sapiens
MEPLRLLILLFVTELSGAHNTTVFQGVAGQSLQVSCPYDSMKHWGRRKAWCRQLGEKGPCQRVVSTHNLWLLSFLRRWNGSTAITDDTLGGTLTITLRNLQPHDAGLYQCQSLHGSEADTLRKVLVEVLADP

SEQ ID NO: 801 - protein, 126 aa, Homo sapiens
LHPLLLLLLLFPGSQAQSKAQVLQSVAGQTLTVRCQYPPTGSLYEKKGWCKEASALVCIRLVTSSKPRTMAWTSRFTIWDDPDAGFFTVTMTDLREEDSGHYWCRIYRPSDNSVSKSVRFYLVVSP

SEQ ID NO: 802 - protein, 105 aa, Homo sapiens
LLWMLFVSELRAATKLTEEKYELKEGQTLDVKCDYTLEKFASSQKAWQIIRDGEMPKTLACTERPSKNSHPVQVGRIILEDYHDHGLLRVRMVNLQVEDSGLYQC

SEQ ID NO: 803 - protein, 118 aa, Homo sapiens
ELRAATKLTGEKYELKEGQTLDVKCDYTLEKFASSQKAWQIIRDGEMPKTLACTERPSKNSHPVQVGRIILEDYHDHGLLRVRMVNLQVEDSGLYQCVIYQPPKEPHMLFDRIRLVVT

SEQ ID NO: 804 - protein, 121 aa, Homo sapiens
VTELSGAHNTTVFQGVAGQSLQVSCPYDSMKHWGRRKAWCRQLGEKGPCQRVVSTHNLWLLSFLRRWNGSTAITDDTLGGTLTITLRNLQPHDAGLYQCQSLHGSEADTLRKVLVEVLADP

SEQ ID NO: 805 - protein, 120 aa, Mus musculus
EVKAAIVLEEERYDLVEGQTLTVKCPFNIMKYANSQKAWQRLPDGKEPLTLVVTQRPFTRPSEVHMGKFTLKHDPSEAMLQVQMTDLQVTDSGLYRCVIYHPPNDPVVLFHPVRLVVTKG

SEQ ID NO: 806 - protein, 121 aa, Mus musculus
ITALSQALNTTVLQGMAGQSLRVSCTYDALKHWGRRKAWCRQLGEEGPCQRVVSTHGVWAAGLPEEADGSTVIADDTLAGTVTITLKNLQAGDAGLYQCQSLRGREREVLQKVLVEVLEDP

SEQ ID NO: 807 - protein, 121 aa, Mus musculus
LCVSGLQAGDEEEHKCFLEGENLTLTCPYNIMLYSLSLKAWQRVRSHGSPETLVLTNTRKADFNVARAGKYLLEDYPTESVVKVTVTGLQRQDVGLYQCVVYLSPDNVIILRQRIRLAWCQ

SEQ ID NO: 808 - protein, 112 aa, Homo sapiens
SQAQSKAQVLQSVAGQTLTVRCQYPPTGSLYEKKGWCKEASALVCIRLVTSSKPRTMAWTSRFTIWDDPDAGFFTVTMTDLREEDSGHYWCRIYRPSDNSVSKSVRFYLVVS

SEQ ID NO: 809 - protein, 109 aa, Homo sapiens
EVEQNSGPLSVPEGAIASLNCTYSDRGSQSFFWYRQYSGKSPELIMSIYSNGDKEDGRFTAQLNKASQYVSLLIRDSQPSDSATYLCAVTTDSWGKLQFGAGTQVVVTP

SEQ ID NO: 810 - protein, 114 aa, Homo sapiens
GVTQTPKFQVLKTGQSMTLQCAQDMNHEYMSWYRQDPGMGLRLIHYSVGAGITDQGEVPNGYNVSRSTTEDFPLRLLSAAPSQTSVYFCASRPGLAGGRPEQYFGPGTRLTVTE

SEQ ID NO: 811 - protein, 121 aa, Homo sapiens
HLEQPQISSTKTLSKTARLECVVSGITISATSVYWYRERPGEVIQFLVSISYDGTVRKESGIPSGKFEVDRIPETSTSTLTIHNVEKQDIATYYCALWEAQQELGKKIKVFGPGTKLIITD

SEQ ID NO: 812 - protein, 119 aa, Homo sapiens
AIELVPEHQTVPVSIGVPATLRCSMKGEAIGNYYINWYRKTQGNTMTFIYREKDIYGPGFKDNFQGDIDIAKNLAVLKILAPSERDEGSYYCACDTLGMGGEYTDKLIFGKGTRVTVEP

SEQ ID NO: 813 - protein, 116 aa, Homo sapiens
DKVTQSSPDQTVASGSEVVLLCTYDTVYSNPDLFWYRIRPDYSFQFVFYGDDSRSEGADFTQGRFSVKHILTQKAFHLVISPVRTEDSATYYCAFTLPPPTDKLIFGKGTRVTVEP

SEQ ID NO: 814 - protein, 115 aa, Mus musculus
QLQQSGAELMKPGASVKISCKASGYTFSDYWIEWVKQRPGHGLEWIGEILPGSGSTNYHERFKGKATFTADTSSSTAYMQLNSLTSEDSGVYYCLHGNYDFDGWGQGTTLTVSSA

SEQ ID NO: 815 - protein, 103 aa, Mus musculus
VLTQSPAIMSASPGEKVTMTCSASSSVNYMYWYQQKSGTPKRWIYDTSKLASGVPVRFSGSGSGTSYSLTISSMETEDAATYYCQQWGRNPTFGGGTKLEIKR

SEQ ID NO: 816 - protein, 113 aa, Homo sapiens
QFRVSPLDRTWNLGETVELKCQVLLSNPTSGCSWLFQPRGAAASPTFLLYLSQNKPKAAEGLDTQRFSGKRLGDTFVLTLSDFRRENEGYYFCSALSNSIMYFSHFVPVFLPA

SEQ ID NO: 817 - protein, 115 aa, Homo sapiens
HVAQPAVVLASSRGIASFVCEYASPGKATEVRVTVLRQADSQVTEVCAATYMMGNELTFLDDSICTGTSSGNQVNLTIQGLRAMDTGLYICKVELMYPPPYYLGIGNGTQIYVID

SEQ ID NO: 818 - protein, 9 aa, synthetic construct
  REGION 1..9: note = Description of Artificial Sequence: Synthetic peptide
  REGION 1..9: note = Synthetic Construct
AWCRQLGEK

SEQ ID NO: 819 - protein, 7 aa, synthetic construct
  REGION 1..7: note = Description of Artificial Sequence: Synthetic peptide
  REGION 1..7: note = Synthetic Construct
HWGRRAW

SEQ ID NO: 820 - protein, 132 aa, synthetic construct
  REGION 1..132: note = Description of Artificial Sequence: Synthetic polypeptide
  REGION 1..132: note = Consensus Sequence
  MOD_RES 1..2: note = Any Amino Acid
  MOD_RES 5: note = Any naturally occurring amino acid
  MOD_RES 8: note = Any naturally occurring amino acid
  MOD_RES 12..22: note = Any naturally occurring amino acid
  MOD_RES 24: note = Any naturally occurring amino acid
  MOD_RES 26: note = Any naturally occurring amino acid
  MOD_RES 31: note = Any naturally occurring amino acid
  MOD_RES 33: note = Any naturally occurring amino acid
  MOD_RES 35: note = Any naturally occurring amino acid
  MOD_RES 37: note = Any naturally occurring amino acid
  MOD_RES 39..47: note = Any naturally occurring amino acid
  MOD_RES 49: note = Any naturally occurring amino acid
  MOD_RES 52..59: note = Any naturally occurring amino acid
  MOD_RES 61: note = Any naturally occurring amino acid
  MOD_RES 63: note = Any naturally occurring amino acid
  MOD_RES 65..77: note = Any naturally occurring amino acid
  MOD_RES 79..83: note = Any naturally occurring amino acid
  MOD_RES 85: note = Any Amino Acid
  MOD_RES 88: note = Any Amino Acid
  MOD_RES 89..90: note = Any naturally occurring amino acid
  MOD_RES 92..93: note = Any naturally occurring amino acid
  MOD_RES 95: note = Any naturally occurring amino acid
  MOD_RES 97..99: note = Any naturally occurring amino acid
  MOD_RES 101..103: note = Any naturally occurring amino acid
  MOD_RES 105: note = Any naturally occurring amino acid
  MOD_RES 107: note = Any naturally occurring amino acid
  MOD_RES 109: note = Any naturally occurring amino acid
  MOD_RES 111..115: note = Any naturally occurring amino acid
  MOD_RES 117..123: note = Any naturally occurring amino acid
  MOD_RES 125..131: note = Any naturally occurring amino acid
XXPLXLLXLLFXXXXXXXXXXXVXQXVAGQXLXVXCXYXXXXXXXXXKXWCXXXXXXXXCXRXVXXXXXXXXXXXXXWXXXXXIXDDXXXGXXTXTXXXLXXXDXGXYXCXXXXXSXXXXXXXVXXXXXXXP

SEQ ID NO: 821 - protein, 107 aa, synthetic construct
  REGION 1..107: note = Description of Artificial Sequence: Synthetic polypeptide
  REGION 1..107: note = Consensus Sequence
  MOD_RES 3..4: note = Any Amino Acid
  MOD_RES 8: note = Any naturally occurring amino acid
  MOD_RES 11..12: note = Any naturally occurring amino acid
  MOD_RES 14..16: note = Any naturally occurring amino acid
  MOD_RES 18..25: note = Any naturally occurring amino acid
  MOD_RES 28: note = Any naturally occurring amino acid
  MOD_RES 30: note = Any naturally occurring amino acid
  MOD_RES 32: note = Any naturally occurring amino acid
  MOD_RES 34: note = Any naturally occurring amino acid
  MOD_RES 36..38: note = Any naturally occurring amino acid
  MOD_RES 40..44: note = Any naturally occurring amino acid
  MOD_RES 48..49: note = Any Amino Acid or absent
  MOD_RES 51..52: note = Any Amino Acid
  MOD_RES 53..54: note = Any naturally occurring amino acid
  MOD_RES 56..76: note = Any naturally occurring amino acid
  MOD_RES 78..81: note = Any naturally occurring amino acid
  MOD_RES 82: note = Any Amino Acid
  MOD_RES 84: note = Any Amino Acid
  MOD_RES 85..87: note = Any naturally occurring amino acid
  MOD_RES 89: note = Any naturally occurring amino acid
  MOD_RES 91..95: note = Any naturally occurring amino acid
  MOD_RES 99..100: note = Any naturally occurring amino acid
  MOD_RES 102: note = Any naturally occurring amino acid
LLXXLFVXELXXAXXXTXXXXXXXXGQXLXVXCXYXXXKXXXXXKAWXXQXXXXGXXXXXXXXXXXXXXXXXXXXXGXXXXXDXXXXGXLXXXXXNLQXXDXGLYQC

SEQ ID NO: 822 - protein, 227 aa, Mus musculus
MGPLHQFLLLLITALSQALNTTVLQGMAGQSLRVSCTYDALKHWGRRKAWCRQLGEEGPCQRVVSTHGVWLLAFLKKRNGSTVIADDTLAGTVTITLKNLQAGDAGLYQCQSLRGREAEVLQKVLVEVLEDPLDDQDAGDLWVPEESSSFEGAQVEHSTSRNQETSFPPTSILLLLACVLLSKFLAASILWAVARGRQKPGTPVVRGLDCGQDAGHQLQILTGPGGT

SEQ ID NO: 823 - protein, 228 aa, Rattus norvegicus
MEPLHVFVLLLVTELSQALNTTVLQGVAGQSLRVSCTYDALRHWGRRKAWCRQLAEEGPCQRVVSTHGVWLLAFLRKQNGSTVITDDTLAGTVTITLRNLQAGDAGLYQCQSLRGREAEVLQKVVVEVLEDPLDDQDAGDLWVPEESESFEGAQVEHSTSSQVSSCGSPLTYHLPPKEPIRKDLLPTHFHSSPPGLCPPEQASYSQHPLGCGQGQAEAGDTCGQWARL

SEQ ID NO: 824 - protein, 260 aa, Macaca mulatta
MPDPLFSAVQGKDKILHKALCICPWPGKGGMEPLRLLILLFATELSGAHNTTVFQGVEGQSLQVSCPYDSMKHWGRRKAWCRQLGEKGPCQRVVSTHNLWLLSFLRRRNGSTAITDDTLGGTLTITLRNLQPHDAGFYQCQSLHGSEADTLRKVLVEVLADPLDHRDAGDLWVPGESESFEDAHVEHSISRSLLEGEIPFPPTSVLLLLACIFLIKILAASALWAAAWHGQKPGTHPPSEPDCGHDPGHQLQTLPGLRDT

SEQ ID NO: 825 - protein, 230 aa, Bos taurus
MEPVVLLILLAVTELSRAHNTTVFQGMMGRSLRVSCPYNSLKHWGRRKAWCRQLGEEGLCQQVVSTHPSWLLSFLKRRNGSTAITDDALGGTLTITLRNLQTHDAGLYQCQSLHGSEADTLRKVLVEVLADPRDYQDPGDLWIPEGSESFENAQVEHSISRSLSEEESPFPPTSILFLLACIFLSKLLAASALWAAAWHGQKQRPPQASGPDCGHNPGYQLQTLTELRDV

SEQ ID NO: 826 - protein, 230 aa, Equus caballus
MEPLPLLILLSVAELSRGHNTTVFQGTAGRSLKVSCPYNSLMHWGRRKAWCRQLGEDGPCQQVVSTHSLWLLSFLKRRNGSTVITDDALGGILTITLRNLQAHDAGFYQCQSLHGGEADTLRKVLVEVLADPLDHQEPGDLWIPKESESFEDAQVEHSISRSLVEEEIPSLPTSILLLLACIFLSKLLAASAIWAAAWHGQKQETPPASEPDRGHDPGYQLHTLTGERDT

SEQ ID NO: 827 - protein, 233 aa, Sus domesticus
METLGLLLLLWVAELSRAHNTSVFQGTAGQSLRVSCSYNSLKHWGRRKAWCRQLSEEGLCQHVVSTHPTWLLSFLKRRNGSTAITDDALGGTLTITLRNLQAHDAGLYQCQSLHGSEADTLKKVLVEVLADPLESQSKSFQDVQMEHSISRNLSEESLFPPTSTLFLLACVFLSKLLVASALWAAAWHGHKQRTSPAGGLDCGRDPGDQDQTLTDELGESSDQDQTLTELRDT

SEQ ID NO: 828 - protein, 230 aa, Canis lupus
MEPLWLLILLAVTELSGAHNTTVFQGMAGRSLQVSCPYNSLKHWGRRKAWCRQVDKEGPCQRVVSTHRSWLLSFLKRWNGSTAIVDDALGGTLTITLRNLQAHDAGLYQCQSLYGDEADTLRKVLVEVLADPLDHLDPGDLWIPEESKGFEDAHVEPSVSRSLSEEEIPFPPTSILFLLACIFLSKFLAASALWAAAWRGQKLGTPQASELDCSCDPGYQLQTLTEPRDM

SEQ ID NO: 829 - protein, 11 aa, synthetic construct
  REGION 1..11: note = Description of Artificial Sequence: Synthetic peptide
  REGION 1..11: note = Synthetic Construct
RASENIYSFLA

SEQ ID NO: 830 - protein, 17 aa, synthetic construct
  REGION 1..17: note = Description of Artificial Sequence: Synthetic peptide
  REGION 1..17: note = Synthetic Construct
KSSQSLLYSSNQKNCLA

SEQ ID NO: 831 - protein, 16 aa, synthetic construct
  REGION 1..16: note = Description of Artificial Sequence: Synthetic peptide
  REGION 1..16: note = Synthetic Construct
KSSQSLLYSNGKTFLS

SEQ ID NO: 832 - protein, 16 aa, synthetic construct
  REGION 1..16: note = Description of Artificial Sequence: Synthetic peptide
  REGION 1..16: note = Synthetic Construct
KSSQSLLDSDGKTYLN

SEQ ID NO: 833 - protein, 10 aa, synthetic construct
  REGION 1..10: note = Description of Artificial Sequence: Synthetic peptide
  REGION 1..10: note = Synthetic Construct
SASSSVSYMY

SEQ ID NO: 834 - protein, 16 aa, synthetic construct
  REGION 1..16: note = Description of Artificial Sequence: Synthetic peptide
  REGION 1..16: note = Synthetic Construct
RSSQSLVHSNGNTYLH

SEQ ID NO: 835 - protein, 16 aa, synthetic construct
  REGION 1..16: note = Description of Artificial Sequence: Synthetic peptide
  REGION 1..16: note = Synthetic Construct
RSSQTIIHSNGNTYLE

SEQ ID NO: 836 - protein, 17 aa, synthetic construct
  REGION 1..17: note = Description of Artificial Sequence: Synthetic peptide
  REGION 1..17: note = Synthetic Construct
KSSQSLLYSSDQKNYLA

SEQ ID NO: 837 - protein, 11 aa, synthetic construct
  REGION 1..11: note = Description of Artificial Sequence: Synthetic peptide
  REGION 1..11: note = Synthetic Construct
RASENIYSYLA

SEQ ID NO: 838 - protein, 11 aa, synthetic construct
  REGION 1..11: note = Description of Artificial Sequence: Synthetic peptide
  REGION 1..11: note = Synthetic Construct
RTSENVYSNLA

SEQ ID NO: 839 - protein, 16 aa, synthetic construct
  REGION 1..16: note = Description of Artificial Sequence: Synthetic peptide
  REGION 1..16: note = Synthetic Construct
RSSQSLVHSNGYTYLH

SEQ ID NO: 840 - protein, 16 aa, synthetic construct
  REGION 1..16: note = Description of Artificial Sequence: Synthetic peptide
  REGION 1..16: note = Synthetic Construct
RFSQSLVHSNGNTYLH

SEQ ID NO: 841 - protein, 10 aa, synthetic construct
  REGION 1..10: note = Description of Artificial Sequence: Synthetic peptide
  REGION 1..10: note = Synthetic Construct
KASSNVNYMS

SEQ ID NO: 842 - protein, 17 aa, synthetic construct
  REGION 1..17: note = Description of Artificial Sequence: Synthetic peptide
  REGION 1..17: note = Synthetic Construct
KSSQSLLNSGNQKKYLT

SEQ ID NO: 843 - protein, 17 aa, synthetic construct
  REGION 1..17: note = Description of Artificial Sequence: Synthetic peptide
  REGION 1..17: note = Synthetic Construct
KSSQSLLYSGNQKNFLA

SEQ ID NO: 844 - protein, 7 aa, synthetic construct
  REGION 1..7: note = Description of Artificial Sequence: Synthetic peptide
  REGION 1..7: note = Synthetic Construct
NSKTFAE

SEQ ID NO: 845 - protein, 7 aa, synthetic construct
  REGION 1..7: note = Description of Artificial Sequence: Synthetic peptide
  REGION 1..7: note = Synthetic Construct
WAFTRES

SEQ ID NO: 846 - protein, 7 aa, synthetic construct
  REGION 1..7: note = Description of Artificial Sequence: Synthetic peptide
  REGION 1..7: note = Synthetic Construct
LVSKLDS

SEQ ID NO: 847 - protein, 7 aa, synthetic construct
  REGION 1..7: note = Description of Artificial Sequence: Synthetic peptide
  REGION 1..7: note = Synthetic Construct
LTSILAS

SEQ ID NO: 848 - protein, 7 aa, synthetic construct
  REGION 1..7: note = Description of Artificial Sequence: Synthetic peptide
  REGION 1..7: note = Synthetic Construct
KVSNRFS

SEQ ID NO: 849 - protein, 7 aa, synthetic construct
  REGION 1..7: note = Description of Artificial Sequence: Synthetic peptide
  REGION 1..7: note = Synthetic Construct
WASTRES

SEQ ID NO: 850 - protein, 7 aa, synthetic construct
  REGION 1..7: note = Description of Artificial Sequence: Synthetic peptide
  REGION 1..7: note = Synthetic Construct
KAKTLAE

SEQ ID NO: 851 - protein, 7 aa, synthetic construct
  REGION 1..7: note = Description of Artificial Sequence: Synthetic peptide
  REGION 1..7: note = Synthetic Construct
AATNLAD

SEQ ID NO: 852 - protein, 7 aa, synthetic construct
  REGION 1..7: note = Description of Artificial Sequence: Synthetic peptide
  REGION 1..7: note = Synthetic Construct
FTSNLPS

SEQ ID NO: 853 - protein, 7 aa, synthetic construct
  REGION 1..7: note = Description of Artificial Sequence: Synthetic peptide
  REGION 1..7: note = Synthetic Construct
KVSNRFC

SEQ ID NO: 854 - protein, 10 aa, synthetic construct
  REGION 1..10: note = Description of Artificial Sequence: Synthetic peptide
  REGION 1..10: note = Synthetic Construct
QHHYGTPPWT

SEQ ID NO: 855 - protein, 9 aa, synthetic construct
  REGION 1..9: note = Description of Artificial Sequence: Synthetic peptide
  REGION 1..9: note = Synthetic Construct
QQYYSYPLT

SEQ ID NO: 856 - protein, 9 aa, synthetic construct
  REGION 1..9: note = Description of Artificial Sequence: Synthetic peptide
  REGION 1..9: note = Synthetic Construct
MQGTHFPLT

SEQ ID NO: 857 - protein, 9 aa, synthetic construct
  REGION 1..9: note = Description of Artificial Sequence: Synthetic peptide
  REGION 1..9: note = Synthetic Construct
WQGTHFPYT

SEQ ID NO: 858 - protein, 9 aa, synthetic construct
  REGION 1..9: note = Description of Artificial Sequence: Synthetic peptide
  REGION 1..9: note = Synthetic Construct
QQWSFNPYT

SEQ ID NO: 859 - protein, 9 aa, synthetic construct
  REGION 1..9: note = Description of Artificial Sequence: Synthetic peptide
  REGION 1..9: note = Synthetic Construct
SQSTHVPLT

SEQ ID NO: 860 - protein, 9 aa, synthetic construct
  REGION 1..9: note = Description of Artificial Sequence: Synthetic peptide
  REGION 1..9: note = Synthetic Construct
FQGSHVPYT

SEQ ID NO: 861 - protein, 9 aa, synthetic construct
  REGION 1..9: note = Description of Artificial Sequence: Synthetic peptide
  REGION 1..9: note = Synthetic Construct
QHHYGTPFT

SEQ ID NO: 862 - protein, 9 aa, synthetic construct
  REGION 1..9: note = Description of Artificial Sequence: Synthetic peptide
  REGION 1..9: note = Synthetic Construct
HHFWGTPYT

SEQ ID NO: 863 - protein, 9 aa, synthetic construct
  REGION 1..9: note = Description of Artificial Sequence: Synthetic peptide
  REGION 1..9: note = Synthetic Construct
SQSTRVPYT

SEQ ID NO: 864 - protein, 9 aa, synthetic construct
  REGION 1..9: note = Description of Artificial Sequence: Synthetic peptide
  REGION 1..9: note = Synthetic Construct
SQSTRVPPT

SEQ ID NO: 865 - protein, 8 aa, synthetic construct
  REGION 1..8: note = Description of Artificial Sequence: Synthetic peptide
  REGION 1..8: note = Synthetic Construct
SGEVTQFT

SEQ ID NO: 866 - protein, 9 aa, synthetic construct
  REGION 1..9: note = Description of Artificial Sequence: Synthetic peptide
  REGION 1..9: note = Synthetic Construct
QNDYGFPLT

SEQ ID NO: 867 - protein, 9 aa, synthetic construct
  REGION 1..9: note = Description of Artificial Sequence: Synthetic peptide
  REGION 1..9: note = Synthetic Construct
QQYYSYPFT

SEQ ID NO: 868 - protein, 9 aa, synthetic construct
  REGION 1..9: note = Description of Artificial Sequence: Synthetic peptide
  REGION 1..9: note = Synthetic Construct
FTLSSYAMS

SEQ ID NO: 869 - protein, 9 aa, synthetic construct
  REGION 1..9: note = Description of Artificial Sequence: Synthetic peptide
  REGION 1..9: note = Synthetic Construct
YTFTEYTMH

SEQ ID NO: 870 - protein, 9 aa, synthetic construct
  REGION 1..9: note = Description of Artificial Sequence: Synthetic peptide
  REGION 1..9: note = Synthetic Construct
YTFTDYEMH

SEQ ID NO: 871 - protein, 9 aa, synthetic construct
  REGION 1..9: note = Description of Artificial Sequence: Synthetic peptide
  REGION 1..9: note = Synthetic Construct
FTFSDAWMG

SEQ ID NO: 872 - protein, 9 aa, synthetic construct
  REGION 1..9: note = Description of Artificial Sequence: Synthetic peptide
  REGION 1..9: note = Synthetic Construct
FSFNTYAMN

SEQ ID NO: 873 - protein, 9 aa, synthetic construct
  REGION 1..9: note = Description of Artificial Sequence: Synthetic peptide
  REGION 1..9: note = Synthetic Construct
YTVSRYWMH

SEQ ID NO: 874 - protein, 9 aa, synthetic construct
  REGION 1..9: note = Description of Artificial Sequence: Synthetic peptide
  REGION 1..9: note = Synthetic Construct
YPFSNFWIT

SEQ ID NO: 875 - protein, 9 aa, synthetic construct
  REGION 1..9: note = Description of Artificial Sequence: Synthetic peptide
  REGION 1..9: note = Synthetic Construct
LTSNTYTQT

SEQ ID NO: 876 - protein, 9 aa, synthetic construct
  REGION 1..9: note = Description of Artificial Sequence: Synthetic peptide
  REGION 1..9: note = Synthetic Construct
FTFSDAWMD

SEQ ID NO: 877 - protein, 9 aa, synthetic construct
  REGION 1..9: note = Description of Artificial Sequence: Synthetic peptide
  REGION 1..9: note = Synthetic Construct
FTFNTYSMN

SEQ ID NO: 878 - protein, 9 aa, synthetic construct
  REGION 1..9: note = Description of Artificial Sequence: Synthetic peptide
  REGION 1..9: note = Synthetic Construct
YTFTTYWIH

SEQ ID NO: 879 - protein, 9 aa, synthetic construct
  REGION 1..9: note = Description of Artificial Sequence: Synthetic peptide
  REGION 1..9: note = Synthetic Construct
YAFSNYWMS

SEQ ID NO: 880 - protein, 9 aa, synthetic construct
  REGION 1..9: note = Description of Artificial Sequence: Synthetic peptide
  REGION 1..9: note = Synthetic Construct
YAFSSSWMN

SEQ ID NO: 881 - protein, 9 aa, synthetic construct
  REGION 1..9: note = Description of Artificial Sequence: Synthetic peptide
  REGION 1..9: note = Synthetic Construct
YIFTTYWIH

SEQ ID NO: 882 - protein, 9 aa, synthetic construct
  REGION 1..9: note = Description of Artificial Sequence: Synthetic peptide
  REGION 1..9: note = Synthetic Construct
FNFNTYAMK

SEQ ID NO: 883 - protein, 9 aa, synthetic construct
  REGION 1..9: note = Description of Artificial Sequence: Synthetic peptide
  REGION 1..9: note = Synthetic Construct
FNFNTYAMN

SEQ ID NO: 884 - protein, 9 aa, synthetic construct
  REGION 1..9: note = Description of Artificial Sequence: Synthetic peptide
  REGION 1..9: note = Synthetic Construct
YTFSDYYIH

SEQ ID NO: 885 - protein, 9 aa, synthetic construct
  REGION 1..9: note = Description of Artificial Sequence: Synthetic peptide
  REGION 1..9: note = Synthetic Construct
FRFNTYAMT

SEQ ID NO: 886 - protein, 13 aa, synthetic construct
  REGION 1..13: note = Description of Artificial Sequence: Synthetic peptide
  REGION 1..13: note = Synthetic Construct
VASISRGGSTYYP

SEQ ID NO: 887 - protein, 14 aa, synthetic construct
  REGION 1..14: note = Description of Artificial Sequence: Synthetic peptide
  REGION 1..14: note = Synthetic Construct
IGGINPNNGGTSYS

SEQ ID NO: 888 - protein, 14 aa, synthetic construct
  REGION 1..14: note = Description of Artificial Sequence: Synthetic peptide
  REGION 1..14: note = Synthetic Construct
IGVIDPETGGTAYN

SEQ ID NO: 889 - protein, 16 aa, synthetic construct
  REGION 1..16: note = Description of Artificial Sequence: Synthetic peptide
  REGION 1..16: note = Synthetic Construct
VAEIRDKVKNHATYYA

SEQ ID NO: 890 - protein, 16 aa, synthetic construct
  REGION 1..16: note = Description of Artificial Sequence: Synthetic peptide
  REGION 1..16: note = Synthetic Construct
IARIRSKSNNYATYYA

SEQ ID NO: 891 - protein, 14 aa, synthetic construct
  REGION 1..14: note = Description of Artificial Sequence: Synthetic peptide
  REGION 1..14: note = Synthetic Construct
IGRIDPNSGGTKYN

SEQ ID NO: 892 - protein, 14 aa, synthetic construct
  REGION 1..14: note = Description of Artificial Sequence: Synthetic peptide
  REGION 1..14: note = Synthetic Construct
IGDIYPGSDNSNYN

SEQ ID NO: 893 - protein, 16 aa, synthetic construct
  REGION 1..16: note = Description of Artificial Sequence: Synthetic peptide
  REGION 1..16: note = Synthetic Construct
ESVIRSKSNNFSTLYA

SEQ ID NO: 894 - protein, 16 aa, synthetic construct
  REGION 1..16: note = Description of Artificial Sequence: Synthetic peptide
  REGION 1..16: note = Synthetic Construct
VAEIRNKVNNHATYYA

SEQ ID NO: 895 - protein, 16 aa, synthetic construct
  REGION 1..16: note = Description of Artificial Sequence: Synthetic peptide
  REGION 1..16: note = Synthetic Construct
  MOD_RES 8: note = Glutamic acid or Glutamine
VAHIKTKXNNFATFYA

SEQ ID NO: 896 - protein, 14 aa, synthetic construct
  REGION 1..14: note = Description of Artificial Sequence: Synthetic peptide
  REGION 1..14: note = Synthetic Construct
IGRNDPNSGGSNYN

SEQ ID NO: 897 - protein, 14 aa, synthetic construct
  REGION 1..14: note = Description of Artificial Sequence: Synthetic peptide
  REGION 1..14: note = Synthetic Construct
IGQIYPGDGDTKYN

SEQ ID NO: 898 - protein, 14 aa, synthetic construct
  REGION 1..14: note = Description of Artificial Sequence: Synthetic peptide
  REGION 1..14: note = Synthetic Construct
IGRIYPGDGDTNYN

SEQ ID NO: 899 - protein, 14 aa, synthetic construct
  REGION 1..14: note = Description of Artificial Sequence: Synthetic peptide
  REGION 1..14: note = Synthetic Construct
IGRIDPNNGDTNYN

SEQ ID NO: 900 - protein, 16 aa, synthetic construct
  REGION 1..16: note = Description of Artificial Sequence: Synthetic peptide
  REGION 1..16: note = Synthetic Construct
IARIRSNSNDYATNYS

SEQ ID NO: 901 - protein, 14 aa, synthetic construct
  REGION 1..14: note = Description of Artificial Sequence: Synthetic peptide
  REGION 1..14: note = Synthetic Construct
IGDIYPGSDNRNFN

SEQ ID NO: 902 - protein, 16 aa, synthetic construct
  REGION 1..16: note = Description of Artificial Sequence: Synthetic peptide
  REGION 1..16: note = Synthetic Construct
VARIRSKSNNYATYYA

SEQ ID NO: 903 - protein, 14 aa, synthetic construct
  REGION 1..14: note = Description of Artificial Sequence: Synthetic peptide
  REGION 1..14: note = Synthetic Construct
IGYIYPNNGDNGYN

SEQ ID NO: 904 - protein, 16 aa, synthetic construct
  REGION 1..16: note = Description of Artificial Sequence: Synthetic peptide
  REGION 1..16: note = Synthetic Construct
EGVIRRKSSNFATLYA

SEQ ID NO: 905 - protein, 13 aa, synthetic construct
  REGION 1..13: note = Description of Artificial Sequence: Synthetic peptide
  REGION 1..13: note = Synthetic Construct
TRGYGYYRTPFAN

SEQ ID NO: 906 - protein, 12 aa, synthetic construct
  REGION 1..12: note = Description of Artificial Sequence: Synthetic peptide
  REGION 1..12: note = Synthetic Construct
ARGGSHYYAMDY

SEQ ID NO: 907 - protein, 18 aa, synthetic construct
  REGION 1..18: note = Description of Artificial Sequence: Synthetic peptide
  REGION 1..18: note = Synthetic Construct
TSPDYYGSSYPLYYAMDY

SEQ ID NO: 908 - protein, 7 aa, synthetic construct
  REGION 1..7: note = Description of Artificial Sequence: Synthetic peptide
  REGION 1..7: note = Synthetic Construct
RLGVFDY

SEQ ID NO: 909 - protein, 13 aa, synthetic construct
  REGION 1..13: note = Description of Artificial Sequence: Synthetic peptide
  REGION 1..13: note = Synthetic Construct
VRHGDGNLWYIDV

SEQ ID NO: 910 - protein, 9 aa, synthetic construct
  REGION 1..9: note = Description of Artificial Sequence: Synthetic peptide
  REGION 1..9: note = Synthetic Construct
VLTGTDFDY

SEQ ID NO: 911 - protein, 13 aa, synthetic construct
  REGION 1..13: note = Description of Artificial Sequence: Synthetic peptide
  REGION 1..13: note = Synthetic Construct
AREAYYTNPGFAY

SEQ ID NO: 912 - protein, 12 aa, synthetic construct
  REGION 1..12: note = Description of Artificial Sequence: Synthetic peptide
  REGION 1..12: note = Synthetic Construct
VRHKSNRYPGVY

SEQ ID NO: 913 - protein, 13 aa, synthetic construct
  REGION 1..13: note = Description of Artificial Sequence: Synthetic peptide
  REGION 1..13: note = Synthetic Construct
TSLYDGYYLRFAY

SEQ ID NO: 914 - protein, 12 aa, synthetic construct
  REGION 1..12: note = Description of Artificial Sequence: Synthetic peptide
  REGION 1..12: note = Synthetic Construct
  MOD_RES 2: note = Glutamic acid or Glutamine
  MOD_RES 4: note = Glutamic acid or Glutamine
VXHXSNNYPFAY

SEQ ID NO: 915 - protein, 9 aa, synthetic construct
  REGION 1..9: note = Description of Artificial Sequence: Synthetic peptide
  REGION 1..9: note = Synthetic Construct
VRTNWDGDF

SEQ ID NO: 916 - protein, 19 aa, synthetic construct
  REGION 1..19: note = Description of Artificial Sequence: Synthetic peptide
  REGION 1..19: note = Synthetic Construct
SREKGADYYGSTYSAWFSY

SEQ ID NO: 917 - protein, 16 aa, synthetic construct
  REGION 1..16: note = Description of Artificial Sequence: Synthetic peptide
  REGION 1..16: note = Synthetic Construct
ARLLRNQPGESYAMDY

SEQ ID NO: 918 - protein, 9 aa, synthetic construct
  REGION 1..9: note = Description of Artificial Sequence: Synthetic peptide
  REGION 1..9: note = Synthetic Construct
VMTGTDFDY

SEQ ID NO: 919 - protein, 12 aa, synthetic construct
  REGION 1..12: note = Description of Artificial Sequence: Synthetic peptide
  REGION 1..12: note = Synthetic Construct
VGHKINNYPFAH

SEQ ID NO: 920 - protein, 13 aa, synthetic construct
  REGION 1..13: note = Description of Artificial Sequence: Synthetic peptide
  REGION 1..13: note = Synthetic Construct
VRHYSNYGWGFAY

SEQ ID NO: 921 - protein, 12 aa, synthetic construct
  REGION 1..12: note = Description of Artificial Sequence: Synthetic peptide
  REGION 1..12: note = Synthetic Construct
ARRGYYGGSYDY

SEQ ID NO: 922 - protein, 12 aa, synthetic construct
  REGION 1..12: note = Description of Artificial Sequence: Synthetic peptide
  REGION 1..12: note = Synthetic Construct
VRHKSNKYPFVY

SEQ ID NO: 923 - protein, 23 aa, synthetic construct
  REGION 1..23: note = Description of Artificial Sequence: Synthetic peptide
  REGION 1..23: note = Synthetic Construct
  MOD_RES 3: note = Glutamic acid or Glutamine
DIXVTQSPASLSASVGETVTITC

SEQ ID NO: 924 - protein, 21 aa, synthetic construct
  REGION 1..21: note = Description of Artificial Sequence: Synthetic peptide
  REGION 1..21: note = Synthetic Construct
TMSQSPSSLAVSVGEKVTMSC

SEQ ID NO: 925 - protein, 23 aa, synthetic construct
  REGION 1..23: note = Description of Artificial Sequence: Synthetic peptide
  REGION 1..23: note = Synthetic Construct
  MOD_RES 3: note = Glutamic acid or Glutamine
DVXMTQTPLTLSVTIGQPASISC

SEQ ID NO: 926 - protein, 21 aa, synthetic construct
  REGION 1..21: note = Description of Artificial Sequence: Synthetic peptide
  REGION 1..21: note = Synthetic Construct
VLTQSPALMSASPGEKVTMTC

SEQ ID NO: 927 - protein, 23 aa, synthetic construct
  REGION 1..23: note = Description of Artificial Sequence: Synthetic peptide
  REGION 1..23: note = Synthetic Construct
  MOD_RES 3: note = Glutamic acid or Glutamine
DVXMTQTPLSLPVSLGDQASISC

SEQ ID NO: 928 - protein, 21 aa, synthetic construct
  REGION 1..21: note = Description of Artificial Sequence: Synthetic peptide
  REGION 1..21: note = Synthetic Construct
  MOD_RES 10: note = Glutamic acid or Glutamine
VLTQSPAIMXASPGEKVTMTC

SEQ ID NO: 929 - protein, 22 aa, synthetic construct
  REGION 1..22: note = Description of Artificial Sequence: Synthetic peptide
  REGION 1..22: note = Synthetic Construct
NVLTQSPALMSASPGEKVTMTC

SEQ ID NO: 930 - protein, 23 aa, synthetic construct
  REGION 1..23: note = Description of Artificial Sequence: Synthetic peptide
  REGION 1..23: note = Synthetic Construct
DVVMTQTPLSLPVSLGDQASISC

SEQ ID NO: 931 - protein, 23 aa, synthetic construct
  REGION 1..23: note = Description of Artificial Sequence: Synthetic peptide
  REGION 1..23: note = Synthetic Construct
DVVMTQTPLTLSVTIGQPASISC

SEQ ID NO: 932 - protein, 22 aa, synthetic construct
  REGION 1..22: note = Description of Artificial Sequence: Synthetic peptide
  REGION 1..22: note = Synthetic Construct
ITMSQSPSSLAVSVGEKVTMSC

SEQ ID NO: 933 - protein, 21 aa, synthetic construct
  REGION 1..21: note = Description of Artificial Sequence: Synthetic peptide
  REGION 1..21: note = Synthetic Construct
  MOD_RES 10: note = Glutamic acid or Glutamine
  MOD_RES 12: note = Glutamic acid or Glutamine
QMSQSPACLXAXVGESVTITC

SEQ ID NO: 934 - protein, 23 aa, synthetic construct
  REGION 1..23: note = Description of Artificial Sequence: Synthetic peptide
  REGION 1..23: note = Synthetic Construct
DIQMTQSPASLSVSVGETVTITC

SEQ ID NO: 935 - protein, 23 aa, synthetic construct
  REGION 1..23: note = Description of Artificial Sequence: Synthetic peptide
  REGION 1..23: note = Synthetic Construct
  MOD_RES 3: note = Glutamic acid or Glutamine
DVXMTQNPLSLPVSLGDQASISC

SEQ ID NO: 936 - protein, 23 aa, synthetic construct
  REGION 1..23: note = Description of Artificial Sequence: Synthetic peptide
  REGION 1..23: note = Synthetic Construct
DVLMTQTPLSLPVSLGDQASISC

SEQ ID NO: 937 - protein, 22 aa, synthetic construct
  REGION 1..22: note = Description of Artificial Sequence: Synthetic peptide
  REGION 1..22: note = Synthetic Construct
  MOD_RES 13: note = Glutamic acid or Glutamine
NVLTQSPALIWAXPGEKVTMTC

SEQ ID NO: 938 - protein, 23 aa, synthetic construct
  REGION 1..23: note = Description of Artificial Sequence: Synthetic peptide
  REGION 1..23: note = Synthetic Construct
  MOD_RES 3: note = Glutamic acid or Glutamine
DIXMTQSPSSLTVTAGEKVTMSC

SEQ ID NO: 939 - protein, 19 aa, synthetic construct
  REGION 1..19: note = Description of Artificial Sequence: Synthetic peptide
  REGION 1..19: note = Synthetic Construct
TQSPSSLAVSVGEKVTMTC

SEQ ID NO: 940 - protein, 15 aa, synthetic construct
  REGION 1..15: note = Description of Artificial Sequence: Synthetic peptide
  REGION 1..15: note = Synthetic Construct
WYQLKQGKSPQLLVY

SEQ ID NO: 941 - protein, 15 aa, synthetic construct
  REGION 1..15: note = Description of Artificial Sequence: Synthetic peptide
  REGION 1..15: note = Synthetic Construct
WYQQKPGQSPKLLIY

SEQ ID NO: 942 - protein, 15 aa, synthetic construct
  REGION 1..15: note = Description of Artificial Sequence: Synthetic peptide
  REGION 1..15: note = Synthetic Construct
WLLQRPGQSPKRLIY

SEQ ID NO: 943 - protein, 15 aa, synthetic construct
  REGION 1..15: note = Description of Artificial Sequence: Synthetic peptide
  REGION 1..15: note = Synthetic Construct
WYQQKPRSSPKPWIY

SEQ ID NO: 944 - protein, 15 aa, synthetic construct
  REGION 1..15: note = Description of Artificial Sequence: Synthetic peptide
  REGION 1..15: note = Synthetic Construct
WYLQKPGQSPKLLIY

SEQ ID NO: 945 - protein, 15 aa, synthetic construct
  REGION 1..15: note = Description of Artificial Sequence: Synthetic peptide
  REGION 1..15: note = Synthetic Construct
WYLRKPGQSPKLLIY

SEQ ID NO: 946 - protein, 15 aa, synthetic construct
  REGION 1..15: note = Description of Artificial Sequence: Synthetic peptide
  REGION 1..15: note = Synthetic Construct
WYQQKQGKSPKLVVY

SEQ ID NO: 947 - protein, 15 aa, synthetic construct
  REGION 1..15: note = Description of Artificial Sequence: Synthetic peptide
  REGION 1..15: note = Synthetic Construct
WYQQKQGKSPQLLVY

SEQ ID NO: 948 - protein, 15 aa, synthetic construct
  REGION 1..15: note = Description of Artificial Sequence: Synthetic peptide
  REGION 1..15: note = Synthetic Construct
  MOD_RES 2..3: note = Any Amino Acid
  MOD_RES 4: note = Any naturally occurring amino acid
WXXXKPRSSPKPGIY

SEQ ID NO: 949 - protein, 15 aa, synthetic construct
  REGION 1..15: note = Description of Artificial Sequence: Synthetic peptide
  REGION 1..15: note = Synthetic Construct
  MOD_RES 10: note = Glutamic acid or Glutamine
WYQQKPGQPXKLLIY

SEQ ID NO: 950 - protein, 32 aa, synthetic construct
  REGION 1..32: note = Description of Artificial Sequence: Synthetic polypeptide
  REGION 1..32: note = Synthetic Construct
GVPSRFSGSGSGTQFSLRINSLQPEDFGSYYC

SEQ ID NO: 951 - protein, 32 aa, synthetic construct
  REGION 1..32: note = Description of Artificial Sequence: Synthetic polypeptide
  REGION 1..32: note = Synthetic Construct
GVPDRFTGSGSGTDFTLTISSVKAEDLAVYYC

SEQ ID NO: 952 - protein, 32 aa, synthetic construct
  REGION 1..32: note = Description of Artificial Sequence: Synthetic polypeptide
  REGION 1..32: note = Synthetic Construct
GVPDRFAGSGSGTDFTLKISRLEADDLGIYYC

SEQ ID NO: 953 - protein, 32 aa, synthetic construct
  REGION 1..32: note = Description of Artificial Sequence: Synthetic polypeptide
  REGION 1..32: note = Synthetic Construct
GVPDRFTGSGSGTDFTLKISRVEAEDLGVYYC

SEQ ID NO: 954 - protein, 32 aa, synthetic construct
  REGION 1..32: note = Description of Artificial Sequence: Synthetic polypeptide
  REGION 1..32: note = Synthetic Construct
GVPARFSGSGSGTSYSLTINNMEAEDAATYYC

SEQ ID NO: 955 - protein, 32 aa, synthetic construct
  REGION 1..32: note = Description of Artificial Sequence: Synthetic polypeptide
  REGION 1..32: note = Synthetic Construct
GVPDRFSGSGSGTDFTLKISRVEAEDLGVYFC

SEQ ID NO: 956 - protein, 32 aa, synthetic construct
  REGION 1..32: note = Description of Artificial Sequence: Synthetic polypeptide
  REGION 1..32: note = Synthetic Construct
GVPARFSGSGSGTSYSLTISSMEAEDAATYYC

SEQ ID NO: 957 - protein, 32 aa, synthetic construct
  REGION 1..32: note = Description of Artificial Sequence: Synthetic polypeptide
  REGION 1..32: note = Synthetic Construct
GVPDRFSGSGSGTDFTLKISRVEAEDLGVYYC

SEQ ID NO: 958 - protein, 32 aa, synthetic construct
  REGION 1..32: note = Description of Artificial Sequence: Synthetic polypeptide
  REGION 1..32: note = Synthetic Construct
  MOD_RES 17: note = Glutamic acid or Glutamine
GVPDRFAGSGSGTDFTXKISRLEADDLGIYYC

SEQ ID NO: 959 - protein, 32 aa, synthetic construct
  REGION 1..32: note = Description of Artificial Sequence: Synthetic polypeptide
  REGION 1..32: note = Synthetic Construct
GVPDRFTGSGSGTDFTLTISSVKAEDLAVYCC

SEQ ID NO: 960 - protein, 32 aa, synthetic construct
  REGION 1..32: note = Description of Artificial Sequence: Synthetic polypeptide
  REGION 1..32: note = Synthetic Construct
GVPDRFSGSGSGTDFTLKISRVEGEDLGVYYC

SEQ ID NO: 961 - protein, 32 aa, synthetic construct
  REGION 1..32: note = Description of Artificial Sequence: Synthetic polypeptide
  REGION 1..32: note = Synthetic Construct
  MOD_RES 22: note = Glutamic acid or Glutamine
GVPSRFSGRGSGTQFFLKINSXQREDFGSYYC

SEQ ID NO: 962 - protein, 32 aa, synthetic construct
  REGION 1..32: note = Description of Artificial Sequence: Synthetic polypeptide
  REGION 1..32: note = Synthetic Construct
GVPSRFSASGSATQFSLKINSLQSADFGSYYC

SEQ ID NO: 963 - protein, 32 aa, synthetic construct
  REGION 1..32: note = Description of Artificial Sequence: Synthetic polypeptide
  REGION 1..32: note = Synthetic Construct
GVPDRFSGSGSGTDFTLKISRVEADDLGVYLC

SEQ ID NO: 964 - protein, 32 aa, synthetic construct
  REGION 1..32: note = Description of Artificial Sequence: Synthetic polypeptide
  REGION 1..32: note = Synthetic Construct
GVPDRFSGSGSGTDFTLRISGVEAEDLGVYFC

SEQ ID NO: 965 - protein, 33 aa, synthetic construct
  REGION 1..33: note = Description of Artificial Sequence: Synthetic polypeptide
  REGION 1..33: note = Synthetic Construct
  MOD_RES 15: note = Any Amino Acid
GVPGRFSGSGSGTYXSFKISSMEGKMGPLIIFC

SEQ ID NO: 966 - protein, 32 aa, synthetic construct
  REGION 1..32: note = Description of Artificial Sequence: Synthetic polypeptide
  REGION 1..32: note = Synthetic Construct
  MOD_RES 11: note = Glutamic acid or Glutamine
GVRDRFTGSGXGTDFTLTISSVQGEDLAIYYC

SEQ ID NO: 967 - protein, 32 aa, synthetic construct
  REGION 1..32: note = Description of Artificial Sequence: Synthetic polypeptide
  REGION 1..32: note = Synthetic Construct
GVPDRFTGSGSGTDFTLTISTVKAEDLAVYYC

SEQ ID NO: 968 - protein, 10 aa, synthetic construct
  REGION 1..10: note = Description of Artificial Sequence: Synthetic peptide
  REGION 1..10: note = Synthetic Construct
FGGGTKLEIK

SEQ ID NO: 969 - protein, 10 aa, synthetic construct
  REGION 1..10: note = Description of Artificial Sequence: Synthetic peptide
  REGION 1..10: note = Synthetic Construct
FGAGTKLELK

SEQ ID NO: 970 - protein, 10 aa, synthetic construct
  REGION 1..10: note = Description of Artificial Sequence: Synthetic peptide
  REGION 1..10: note = Synthetic Construct
FGGGTKLVIK

SEQ ID NO: 971 - protein, 10 aa, synthetic construct
  REGION 1..10: note = Description of Artificial Sequence: Synthetic peptide
  REGION 1..10: note = Synthetic Construct
FGGGTELEIK

SEQ ID NO: 972 - protein, 10 aa, synthetic construct
  REGION 1..10: note = Description of Artificial Sequence: Synthetic peptide
  REGION 1..10: note = Synthetic Construct
FGGGTKLEMK

SEQ ID NO: 973 - protein, 10 aa, synthetic construct
  REGION 1..10: note = Description of Artificial Sequence: Synthetic peptide
  REGION 1..10: note = Synthetic Construct
FGSGTKLEIK

SEQ ID NO: 974 - protein, 10 aa, synthetic construct
  REGION 1..10: note = Description of Artificial Sequence: Synthetic peptide
  REGION 1..10: note = Synthetic Construct
FGGGTKLEMN

SEQ ID NO: 975 - protein, 10 aa, synthetic construct
  REGION 1..10: note = Description of Artificial Sequence: Synthetic peptide
  REGION 1..10: note = Synthetic Construct
FGGGTKLEMK

SEQ ID NO: 976 - protein, 26 aa, synthetic construct
  REGION 1..26: note = Description of Artificial Sequence: Synthetic peptide
  REGION 1..26: note = Synthetic Construct
EVKLVESGGGLVKPGGSLKLSCAASG

SEQ ID NO: 977 - protein, 26 aa, synthetic construct
  REGION 1..26: note = Description of Artificial Sequence: Synthetic peptide
  REGION 1..26: note = Synthetic Construct
EVQLQQSGPELVKPGTSVKISCKTSG

SEQ ID NO: 978 - protein, 26 aa, synthetic construct
  REGION 1..26: note = Description of Artificial Sequence: Synthetic peptide
  REGION 1..26: note = Synthetic Construct
QVQLQQSGAELVRPGASVTLSCKASG

SEQ ID NO: 979 - protein, 26 aa, synthetic construct
  REGION 1..26: note = Description of Artificial Sequence: Synthetic peptide
  REGION 1..26: note = Synthetic Construct
EVKLEESGGGLVQPGGSMKLSCAASG

SEQ ID NO: 980 - protein, 26 aa, synthetic construct
  REGION 1..26: note = Description of Artificial Sequence: Synthetic peptide
  REGION 1..26: note = Synthetic Construct
EVQLVESGGGLVQPKGSLKLSCAASG

SEQ ID NO: 981 - protein, 26 aa, synthetic construct
  REGION 1..26: note = Description of Artificial Sequence: Synthetic peptide
  REGION 1..26: note = Synthetic Construct
QVQLQQSGAELVKPGASVKLSCKASG

SEQ ID NO: 982 - protein, 26 aa, synthetic construct
  REGION 1..26: note = Description of Artificial Sequence: Synthetic peptide
  REGION 1..26: note = Synthetic Construct
  MOD_RES 1: note = Glutamic acid or Glutamine
XVQLVESGGGLVQPKGSLKLSCAASG

SEQ ID NO: 983 - protein, 26 aa, synthetic construct
  REGION 1..26: note = Description of Artificial Sequence: Synthetic peptide
  REGION 1..26: note = Synthetic Construct
QVQLQQSGAELVKPGASVKMSCKTSG

SEQ ID NO: 984 - protein, 26 aa, synthetic construct
  REGION 1..26: note = Description of Artificial Sequence: Synthetic peptide
  REGION 1..26: note = Synthetic Construct
  MOD_RES 6..7: note = Glutamic acid or Glutamine
  MOD_RES 11: note = Any naturally occurring amino acid
  MOD_RES 18: note = Any Amino Acid
  MOD_RES 19..20: note = Any naturally occurring amino acid
  MOD_RES 24: note = Any naturally occurring amino acid
EVQLVXXGRGXSQGKGSXXXGRAXRC

SEQ ID NO: 985 - protein, 26 aa, synthetic construct
  REGION 1..26: note = Description of Artificial Sequence: Synthetic peptide
  REGION 1..26: note = Synthetic Construct
EVKLEESGGGLVQPGGSMKLSCTASG

SEQ ID NO: 986 - protein, 7 aa, synthetic construct
  REGION 1..7: note = Description of Artificial Sequence: Synthetic peptide
  REGION 1..7: note = Synthetic Construct
LSCAASG

SEQ ID NO: 987 - protein, 26 aa, synthetic construct
  REGION 1..26: note = Description of Artificial Sequence: Synthetic peptide
  REGION 1..26: note = Synthetic Construct
QVQLQQSGAVLVKPGASVKLSCKASG

SEQ ID NO: 988 - protein, 26 aa, synthetic construct
  REGION 1..26: note = Description of Artificial Sequence: Synthetic peptide
  REGION 1..26: note = Synthetic Construct
EVQLQQSGAELVKPGASVKISCKASG

SEQ ID NO: 989 - protein, 26 aa, synthetic construct
  REGION 1..26: note = Description of Artificial Sequence: Synthetic peptide
  REGION 1..26: note = Synthetic Construct
QVQLQQSGPELVKPGASLKISCKASG

SEQ ID NO: 990 - protein, 26 aa, synthetic construct
  REGION 1..26: note = Description of Artificial Sequence: Synthetic peptide
  REGION 1..26: note = Synthetic Construct
EVQLVESGGGLVQPKGSLKLSCAAFG

SEQ ID NO: 991 - protein, 26 aa, synthetic construct
  REGION 1..26: note = Description of Artificial Sequence: Synthetic peptide
  REGION 1..26: note = Synthetic Construct
QVQLQQSGAEVVKPGASVKMSCKTSG

SEQ ID NO: 992 - protein, 26 aa, synthetic construct
  REGION 1..26: note = Description of Artificial Sequence: Synthetic peptide
  REGION 1..26: note = Synthetic Construct
EVQLVESGGRLVQPKGSLKLSCAASG

SEQ ID NO: 993 - protein, 26 aa, synthetic construct
  REGION 1..26: note = Description of Artificial Sequence: Synthetic peptide
  REGION 1..26: note = Synthetic Construct
QVQLQQYGPELVKPGASVKMSCKVSG

SEQ ID NO: 994 - protein, 18 aa, synthetic construct
  REGION 1..18: note = Description of Artificial Sequence: Synthetic peptide
  REGION 1..18: note = Synthetic Construct
WRIGQGKGSLKLARAARG

SEQ ID NO: 995 - protein, 12 aa, synthetic construct
  REGION 1..12: note = Description of Artificial Sequence: Synthetic peptide
  REGION 1..12: note = Synthetic Construct
WVRQTPEKRLEW

SEQ ID NO: 996 - protein, 12 aa, synthetic construct
  REGION 1..12: note = Description of Artificial Sequence: Synthetic peptide
  REGION 1..12: note = Synthetic Construct
WVKQSHGKSLEW

SEQ ID NO: 997 - protein, 12 aa, synthetic construct
  REGION 1..12: note = Description of Artificial Sequence: Synthetic peptide
  REGION 1..12: note = Synthetic Construct
WVKQTPVHGLEW

SEQ ID NO: 998 - protein, 12 aa, synthetic construct
  REGION 1..12: note = Description of Artificial Sequence: Synthetic peptide
  REGION 1..12: note = Synthetic Construct
WVRQSPEKGLEW

SEQ ID NO: 999 - protein, 12 aa, synthetic construct
  REGION 1..12: note = Description of Artificial Sequence: Synthetic peptide
  REGION 1..12: note = Synthetic Construct
WVRQAPGKGLEW

SEQ ID NO: 1000 - protein, 12 aa, synthetic construct
  REGION 1..12: note = Description of Artificial Sequence: Synthetic peptide
  REGION 1..12: note = Synthetic Construct
WVKQRPGRGLEW

SEQ ID NO: 1001 - protein, 12 aa, synthetic construct
  REGION 1..12: note = Description of Artificial Sequence: Synthetic peptide
  REGION 1..12: note = Synthetic Construct
WVKQRPGQGLVW

SEQ ID NO: 1002 - protein, 12 aa, synthetic construct
  REGION 1..12: note = Description of Artificial Sequence: Synthetic peptide
  REGION 1..12: note = Synthetic Construct
GVPQGPGKGREW

SEQ ID NO: 1003 - protein, 12 aa, synthetic construct
  REGION 1..12: note = Description of Artificial Sequence: Synthetic peptide
  REGION 1..12: note = Synthetic Construct
WVKQRPGRGPEW

SEQ ID NO: 1004 - protein, 12 aa, synthetic construct
  REGION 1..12: note = Description of Artificial Sequence: Synthetic peptide
  REGION 1..12: note = Synthetic Construct
WVKQRPGKGLEW

SEQ ID NO: 1005 - protein, 12 aa, synthetic construct
  REGION 1..12: note = Description of Artificial Sequence: Synthetic peptide
  REGION 1..12: note = Synthetic Construct
WVRQTPGKGLEW

SEQ ID NO: 1006 - protein, 12 aa, synthetic construct
  REGION 1..12: note = Description of Artificial Sequence: Synthetic peptide
  REGION 1..12: note = Synthetic Construct
WMKQSHGKSLEW

SEQ ID NO: 1007 - protein, 12 aa, synthetic construct
  REGION 1..12: note = Description of Artificial Sequence: Synthetic peptide
  REGION 1..12: note = Synthetic Construct
RVRQGPGKGREW

SEQ ID NO: 1008 - protein, 35 aa, synthetic construct
  REGION 1..35: note = Description of Artificial Sequence: Synthetic polypeptide
  REGION 1..35: note = Synthetic Construct
DSVQGRFTFSRDNARNILYLQMSSLRSEDTAMYYC

SEQ ID NO: 1009 - protein, 35 aa, synthetic construct
  REGION 1..35: note = Description of Artificial Sequence: Synthetic polypeptide
  REGION 1..35: note = Synthetic Construct
QKFKGKASLTVDKSSSTAYMELHSLASDDSAVYYC

SEQ ID NO: 1010 - protein, 35 aa, synthetic construct
  REGION 1..35: note = Description of Artificial Sequence: Synthetic polypeptide
  REGION 1..35: note = Synthetic Construct
QKFKGKAILTADKSSSTAYMELRSLTSEDSAVYYC

SEQ ID NO: 1011 - protein, 35 aa, synthetic construct
  REGION 1..35: note = Description of Artificial Sequence: Synthetic polypeptide
  REGION 1..35: note = Synthetic Construct
ESVKGRFTISRDDSKSTVYLQMNTLRADDTGIYYC

SEQ ID NO: 1012 - protein, 35 aa, synthetic construct
  REGION 1..35: note = Description of Artificial Sequence: Synthetic polypeptide
  REGION 1..35: note = Synthetic Construct
DSVKDRITCSRDDSENMFYLQLSSLKTEDTAMYYC

SEQ ID NO: 1013 - protein, 35 aa, synthetic construct
  REGION 1..35: note = Description of Artificial Sequence: Synthetic polypeptide
  REGION 1..35: note = Synthetic Construct
EKFKTKATLTVDKPSSTAYMQVSSLTSEDSAVYYC

SEQ ID NO: 1014 - protein, 35 aa, synthetic construct
  REGION 1..35: note = Description of Artificial Sequence: Synthetic polypeptide
  REGION 1..35: note = Synthetic Construct
DSVKDRFTCSRDDSENMFYLQLSSLKTEDTAIYYC

SEQ ID NO: 1015 - protein, 35 aa, synthetic construct
  REGION 1..35: note = Description of Artificial Sequence: Synthetic polypeptide
  REGION 1..35: note = Synthetic Construct
DSVKDRFTCSRDDSENMFYLQLSSLKTEDTAMYYC

SEQ ID NO: 1016 - protein, 35 aa, synthetic construct
  REGION 1..35: note = Description of Artificial Sequence: Synthetic polypeptide
  REGION 1..35: note = Synthetic Construct
EKFKTKATLTVDTSSSTAYMHLSSLTSEDSAVYFC

SEQ ID NO: 1017 - protein, 35 aa, synthetic construct
  REGION 1..35: note = Description of Artificial Sequence: Synthetic polypeptide
  REGION 1..35: note = Synthetic Construct
  MOD_RES 9: note = Glutamic acid or Glutamine
  MOD_RES 20: note = Glutamic acid or Glutamine
  MOD_RES 24..25: note = Any naturally occurring amino acid
  MOD_RES 27: note = Any naturally occurring amino acid
  MOD_RES 35: note = Any naturally occurring amino acid
DSVKDRFTXSRDDSESLFYXQMSXXKXEDTAMYYX

SEQ ID NO: 1018 - protein, 35 aa, synthetic construct
  REGION 1..35: note = Description of Artificial Sequence: Synthetic polypeptide
  REGION 1..35: note = Synthetic Construct
ESVKGRFTISRDDSKSTVYLQMNSLRTEDTGIYYC

SEQ ID NO: 1019 - protein, 35 aa, synthetic construct
  REGION 1..35: note = Description of Artificial Sequence: Synthetic polypeptide
  REGION 1..35: note = Synthetic Construct
  MOD_RES 23: note = Glutamic acid or Glutamine
DSVKDRFTISRDDSESMLYLQMXNLKTEDTAMYYC

SEQ ID NO: 1020 - protein, 35 aa, synthetic construct
  REGION 1..35: note = Description of Artificial Sequence: Synthetic polypeptide
  REGION 1..35: note = Synthetic Construct
  MOD_RES 30: note = Glutamic acid or Glutamine
EKFRNKAILTVDKPSSTAYMQLNSLTSEDXAVYYC

SEQ ID NO: 1021 - protein, 35 aa, synthetic construct
  REGION 1..35: note = Description of Artificial Sequence: Synthetic polypeptide
  REGION 1..35: note = Synthetic Construct
GKFEGKATLTADKSSSTAYMQLSSLTSEDSAVYFC

SEQ ID NO: 1022 - protein, 35 aa, synthetic construct
  REGION 1..35: note = Description of Artificial Sequence: Synthetic polypeptide
  REGION 1..35: note = Synthetic Construct
GEFRVRATLTADTSSTTAYMQLSSLTSEDSAVYFC

SEQ ID NO: 1023 - protein, 35 aa, synthetic construct
  REGION 1..35: note = Description of Artificial Sequence: Synthetic polypeptide
  REGION 1..35: note = Synthetic Construct
EKFKTKATLTVDKPSSTADMQLSSLTSEDSAVYYC

SEQ ID NO: 1024 - protein, 35 aa, synthetic construct
  REGION 1..35: note = Description of Artificial Sequence: Synthetic polypeptide
  REGION 1..35: note = Synthetic Construct
DSVKDRFTISRDDSESIVYVQMNNLKTEDTGMYSC

SEQ ID NO: 1025 - protein, 35 aa, synthetic construct
  REGION 1..35: note = Description of Artificial Sequence: Synthetic polypeptide
  REGION 1..35: note = Synthetic Construct
ERFKTKATLTVDTSSSTAYMHLSSLTSEDSAVYFC

SEQ ID NO: 1026 - protein, 35 aa, synthetic construct
  REGION 1..35: note = Description of Artificial Sequence: Synthetic polypeptide
  REGION 1..35: note = Synthetic Construct
DSVKDRFTISRDDSESMLYLQMNNLKTEDTAMYYC

SEQ ID NO: 1027 - protein, 35 aa, synthetic construct
  REGION 1..35: note = Description of Artificial Sequence: Synthetic polypeptide
  REGION 1..35: note = Synthetic Construct
  MOD_RES 34: note = Glutamic acid or Glutamine
QEFKGKATLTVDKSSSTAYMELRSLTFEDSAVYXC

SEQ ID NO: 1028 - protein, 35 aa, synthetic construct
  REGION 1..35: note = Description of Artificial Sequence: Synthetic polypeptide
  REGION 1..35: note = Synthetic Construct
DSVKDRFRASRDDSESMLYVQMSNWKQEDTAMYYG

SEQ ID NO: 1029 - protein, 11 aa, synthetic construct
  REGION 1..11: note = Description of Artificial Sequence: Synthetic peptide
  REGION 1..11: note = Synthetic Construct
WGQGTLVTVSA

SEQ ID NO: 1030 - protein, 11 aa, synthetic construct
  REGION 1..11: note = Description of Artificial Sequence: Synthetic peptide
  REGION 1..11: note = Synthetic Construct
WGQGTSVTVSS

SEQ ID NO: 1031 - protein, 11 aa, synthetic construct
  REGION 1..11: note = Description of Artificial Sequence: Synthetic peptide
  REGION 1..11: note = Synthetic Construct
WGQGTTLTVSS

SEQ ID NO: 1032 - protein, 11 aa, synthetic construct
  REGION 1..11: note = Description of Artificial Sequence: Synthetic peptide
  REGION 1..11: note = Synthetic Construct
WGTGTTVTVST

SEQ ID NO: 1033 - protein, 11 aa, synthetic construct
  REGION 1..11: note = Description of Artificial Sequence: Synthetic peptide
  REGION 1..11: note = Synthetic Construct
WGTGTTVTVSS

SEQ ID NO: 1034 - protein, 11 aa, synthetic construct
  REGION 1..11: note = Description of Artificial Sequence: Synthetic peptide
  REGION 1..11: note = Synthetic Construct
WGQGTLVTVST

SEQ ID NO: 1035 - protein, 10 aa, synthetic construct
  REGION 1..10: note = Description of Artificial Sequence: Synthetic peptide
  REGION 1..10: note = Synthetic Construct
WGQGTIVTVS

SEQ ID NO: 1036 - protein, 11 aa, synthetic construct
  REGION 1..11: note = Description of Artificial Sequence: Synthetic peptide
  REGION 1..11: note = Synthetic Construct
WGQGASVTVSS

SEQ ID NO: 1037 - protein, 7 aa, synthetic construct
  REGION 1..7: note = Description of Artificial Sequence: Synthetic peptide
  REGION 1..7: note = Synthetic Construct
WGRGTLV

SEQ ID NO: 1038 - protein, 5 aa, synthetic construct
  REGION 1..5: note = Description of Artificial Sequence: Synthetic peptide
  REGION 1..5: note = Synthetic Construct
WGQGT

SEQ ID NO: 1039 - protein, 108 aa, synthetic construct
  REGION 1..108: note = Description of Artificial Sequence: Synthetic polypeptide
  REGION 1..108: note = Synthetic Construct
  MOD_RES 3: note = Glutamic acid or Glutamine
DIXVTQSPASLSASVGETVTITCRASENIYSFLAWYQLKQGKSPQLLVYNSKTFAEGVPSRFSGSGSGTQFSLRINSLQPEDFGSYYCQHHYGTPPWTFGGGTKLEIK

SEQ ID NO: 1040 - protein, 108 aa, synthetic construct
  REGION 1..108: note = Description of Artificial Sequence: Synthetic polypeptide
  REGION 1..108: note = Synthetic Construct
EIVMTQSPATLSVSPGERATLSCRASENIYSFLAWYQQKPGQAPRLLIYNSKTFAEGIPARFSGSGSGTEFTLTISSLQSEDFAVYYCQHHYGTPPWTFGQGTKVEIK

SEQ ID NO: 1041 - protein, 108 aa, synthetic construct
  REGION 1..108: note = Description of Artificial Sequence: Synthetic polypeptide
  REGION 1..108: note = Synthetic Construct
DIQLTQSPSFLSASVGDRVTITCRASENIYSFLAWYQQKPGKAPKLLIYNSKTFAEGVPSRFSGSGSGTEFTLTISSLQPEDFATYYCQHHYGTPPWTFGQGTKVEIK

SEQ ID NO: 1042 - protein, 108 aa, synthetic construct
  REGION 1..108: note = Description of Artificial Sequence: Synthetic polypeptide
  REGION 1..108: note = Synthetic Construct
EIVLTQSPATLSLSPGERATLSCRASENIYSFLAWYQQKPGQAPRLLIYNSKTFAEGIPARFSGSGSGTDFTLTISSLEPEDFAVYYCQHHYGTPPWTFGQGTKVEIK

SEQ ID NO: 1043 - protein, 108 aa, synthetic construct
  REGION 1..108: note = Description of Artificial Sequence: Synthetic polypeptide
  REGION 1..108: note = Synthetic Construct
DIQMTQSPSTLSASVGDRVTITCRASENIYSFLAWYQQKPGKAPKLLIYNSKTFAEGVPSRFSGSGSGTEFTLTISSLQPDDFATYYCQHHYGTPPWTFGQGTKVEIK

SEQ ID NO: 1044 - protein, 108 aa, synthetic construct
  REGION 1..108: note = Description of Artificial Sequence: Synthetic polypeptide
  REGION 1..108: note = Synthetic Construct
DIQMTQSPSSLSASVGDRVTITCRASENIYSFLAWYQQKPGKAPKLLIYNSKTFAEGVPSRFSGSGSGTDFTLTISSLQPEDFATYYCQHHYGTPPWTFGQGTKVEIK

SEQ ID NO: 1045 - protein, 108 aa, synthetic construct
  REGION 1..108: note = Description of Artificial Sequence: Synthetic polypeptide
  REGION 1..108: note = Synthetic Construct
DIQMTQSPSSLSASVGDRVTITCRASENIYSFLAWYQQKPGKAPKLLIYNSKTFAEGVPSRFSGSGSGTDFTFTISSLQPEDIATYYCQHHYGTPPWTFGQGTKVEIK

SEQ ID NO: 1046 - protein, 108 aa, synthetic construct
  REGION 1..108: note = Description of Artificial Sequence: Synthetic polypeptide
  REGION 1..108: note = Synthetic Construct
EIVLTQSPGTLSLSPGERATLSCRASENIYSFLAWYQQKPGQAPRLLIYNSKTFAEGIPDRFSGSGSGTDFTLTISRLEPEDFAVYYCQHHYGTPPWTFGQGTKVEIK

SEQ ID NO: 1047 - protein, 108 aa, synthetic construct
  REGION 1..108: note = Description of Artificial Sequence: Synthetic polypeptide
  REGION 1..108: note = Synthetic Construct
DIVMTQSPLSLPVTPGEPASISCRASENIYSFLAWYLQKPGQSPQLLIYNSKTFAEGVPDRFSGSGSGTDFTLKISRVEAEDVGVYYCQHHYGTPPWTFGQGTKVEIK

SEQ ID NO: 1048 - protein, 108 aa, synthetic construct
  REGION 1..108: note = Description of Artificial Sequence: Synthetic polypeptide
  REGION 1..108: note = Synthetic Construct
DVVMTQSPLSLPVTLGQPASISCRASENIYSFLAWFQQRPGQSPRRLIYNSKTFAEGVPDRFSGSGSGTDFTLKISRVEAEDVGVYYCQHHYGTPPWTFGQGTKVEIK

SEQ ID NO: 1049 - protein, 108 aa, synthetic construct
  REGION 1..108: note = Description of Artificial Sequence: Synthetic polypeptide
  REGION 1..108: note = Synthetic Construct
DIVMTQSPDSLAVSLGERATINCRASENIYSFLAWYQQKPGQPPKLLIYNSKTFAEGVPDRFSGSGSGTDFTLTISSLQAEDVAVYYCQHHYGTPPWTFGQGTKVEIK

SEQ ID NO: 1050 - protein, 111 aa, synthetic construct
  REGION 1..111: note = Description of Artificial Sequence: Synthetic polypeptide
  REGION 1..111: note = Synthetic Construct
TMSQSPSSLAVSVGEKVTMSCKSSQSLLYSSNQKNCLAWYQQKPGQSPKLLIYWAFTRESGVPDRFTGSGSGTDFTLTISSVKAEDLAVYYCQQYYSYPLTFGAGTKLELK

SEQ ID NO: 1051 - protein, 113 aa, synthetic construct
  REGION 1..113: note = Description of Artificial Sequence: Synthetic polypeptide
  REGION 1..113: note = Synthetic Construct
DIVMTQSPDSLAVSLGERATINCKSSQSLLYSSNQKNCLAWYQQKPGQPPKLLIYWAFTRESGVPDRFSGSGSGTDFTLTISSLQAEDVAVYYCQQYYSYPLTFGQGTKVEIK

SEQ ID NO: 1052 - protein, 113 aa, synthetic construct
  REGION 1..113: note = Description of Artificial Sequence: Synthetic polypeptide
  REGION 1..113: note = Synthetic Construct
DVVMTQSPLSLPVTLGQPASISCKSSQSLLYSSNQKNCLAWFQQRPGQSPRRLIYWAFTRESGVPDRFSGSGSGTDFTLKISRVEAEDVGVYYCQQYYSYPLTFGQGTKVEIK

SEQ ID NO: 1053 - protein, 113 aa, synthetic construct
  REGION 1..113: note = Description of Artificial Sequence: Synthetic polypeptide
  REGION 1..113: note = Synthetic Construct
DIVMTQSPLSLPVTPGEPASISCKSSQSLLYSSNQKNCLAWYLQKPGQSPQLLIYWAFTRESGVPDRFSGSGSGTDFTLKISRVEAEDVGVYYCQQYYSYPLTFGQGTKVEIK

SEQ ID NO: 1054 - protein, 113 aa, synthetic construct
  REGION 1..113: note = Description of Artificial Sequence: Synthetic polypeptide
  REGION 1..113: note = Synthetic Construct
DIQLTQSPSFLSASVGDRVTITCKSSQSLLYSSNQKNCLAWYQQKPGKAPKLLIYWAFTRESGVPSRFSGSGSGTEFTLTISSLQPEDFATYYCQQYYSYPLTFGQGTKVEIK

SEQ ID NO: 1055 - protein, 113 aa, synthetic construct
  REGION 1..113: note = Description of Artificial Sequence: Synthetic polypeptide
  REGION 1..113: note = Synthetic Construct
DIQMTQSPSTLSASVGDRVTITCKSSQSLLYSSNQKNCLAWYQQKPGKAPKLLIYWAFTRESGVPSRFSGSGSGTEFTLTISSLQPDDFATYYCQQYYSYPLTFGQGTKVEIK

SEQ ID NO: 1056 - protein, 113 aa, synthetic construct
  REGION 1..113: note = Description of Artificial Sequence: Synthetic polypeptide
  REGION 1..113: note = Synthetic Construct
EIVMTQSPATLSVSPGERATLSCKSSQSLLYSSNQKNCLAWYQQKPGQAPRLLIYWAFTRESGIPARFSGSGSGTEFTLTISSLQSEDFAVYYCQQYYSYPLTFGQGTKVEIK

SEQ ID NO: 1057 - protein, 113 aa, synthetic construct
  REGION 1..113: note = Description of Artificial Sequence: Synthetic polypeptide
  REGION 1..113: note = Synthetic Construct
DIQMTQSPSSLSASVGDRVTITCKSSQSLLYSSNQKNCLAWYQQKPGKAPKLLIYWAFTRESGVPSRFSGSGSGTDFTFTISSLQPEDIATYYCQQYYSYPLTFGQGTKVEIK

SEQ ID NO: 1058 - protein, 113 aa, synthetic construct
  REGION 1..113: note = Description of Artificial Sequence: Synthetic polypeptide
  REGION 1..113: note = Synthetic Construct
DIQMTQSPSSLSASVGDRVTITCKSSQSLLYSSNQKNCLAWYQQKPGKAPKLLIYWAFTRESGVPSRFSGSGSGTDFTLTISSLQPEDFATYYCQQYYSYPLTFGQGTKVEIK

SEQ ID NO: 1059 - protein, 113 aa, synthetic construct
  REGION 1..113: note = Description of Artificial Sequence: Synthetic polypeptide
  REGION 1..113: note = Synthetic Construct
EIVLTQSPATLSLSPGERATLSCKSSQSLLYSSNQKNCLAWYQQKPGQAPRLLIYWAFTRESGIPARFSGSGSGTDFTLTISSLEPEDFAVYYCQQYYSYPLTFGQGTKVEIK

SEQ ID NO: 1060 - protein, 113 aa, synthetic construct
  REGION 1..113: note = Description of Artificial Sequence: Synthetic polypeptide
  REGION 1..113: note = Synthetic Construct
EIVLTQSPGTLSLSPGERATLSCKSSQSLLYSSNQKNCLAWYQQKPGQAPRLLIYWAFTRESGIPDRFSGSGSGTDFTLTISRLEPEDFAVYYCQQYYSYPLTFGQGTKVEIK

SEQ ID NO: 1061 - protein, 112 aa, synthetic construct
  REGION 1..112: note = Description of Artificial Sequence: Synthetic polypeptide
  REGION 1..112: note = Synthetic Construct
  MOD_RES 3: note = Glutamic acid or Glutamine
DVXMTQTPLTLSVTIGQPASISCKSSQSLLYSNGKTFLSWLLQRPGQSPKRLIYLVSKLDSGVPDRFAGSGSGTDFTLKISRLEADDLGIYYCMQGTHFPLTFGAGTKLELK

SEQ ID NO: 1062 - protein, 112 aa, synthetic construct
  REGION 1..112: note = Description of Artificial Sequence: Synthetic polypeptide
  REGION 1..112: note = Synthetic Construct
DVVMTQSPLSLPVTLGQPASISCKSSQSLLYSNGKTFLSWFQQRPGQSPRRLIYLVSKLDSGVPDRFSGSGSGTDFTLKISRVEAEDVGVYYCMQGTHFPLTFGQGTKVEIK

SEQ ID NO: 1063 - protein, 112 aa, synthetic construct
  REGION 1..112: note = Description of Artificial Sequence: Synthetic polypeptide
  REGION 1..112: note = Synthetic Construct
DIVMTQSPLSLPVTPGEPASISCKSSQSLLYSNGKTFLSWYLQKPGQSPQLLIYLVSKLDSGVPDRFSGSGSGTDFTLKISRVEAEDVGVYYCMQGTHFPLTFGQGTKVEIK

SEQ ID NO: 1064 - protein, 112 aa, synthetic construct
  REGION 1..112: note = Description of Artificial Sequence: Synthetic polypeptide
  REGION 1..112: note = Synthetic Construct
DIVMTQSPDSLAVSLGERATINCKSSQSLLYSNGKTFLSWYQQKPGQPPKLLIYLVSKLDSGVPDRFSGSGSGTDFTLTISSLQAEDVAVYYCMQGTHFPLTFGQGTKVEIK

SEQ ID NO: 1065 - protein, 112 aa, synthetic construct
  REGION 1..112: note = Description of Artificial Sequence: Synthetic polypeptide
  REGION 1..112: note = Synthetic Construct
DIQMTQSPSTLSASVGDRVTITCKSSQSLLYSNGKTFLSWYQQKPGKAPKLLIYLVSKLDSGVPSRFSGSGSGTEFTLTISSLQPDDFATYYCMQGTHFPLTFGQGTKVEIK

SEQ ID NO: 1066 - protein, 112 aa, synthetic construct
  REGION 1..112: note = Description of Artificial Sequence: Synthetic polypeptide
  REGION 1..112: note = Synthetic Construct
DIQLTQSPSFLSASVGDRVTITCKSSQSLLYSNGKTFLSWYQQKPGKAPKLLIYLVSKLDSGVPSRFSGSGSGTEFTLTISSLQPEDFATYYCMQGTHFPLTFGQGTKVEIK

SEQ ID NO: 1067 - protein, 112 aa, synthetic construct
  REGION 1..112: note = Description of Artificial Sequence: Synthetic polypeptide
  REGION 1..112: note = Synthetic Construct
DIQMTQSPSSLSASVGDRVTITCKSSQSLLYSNGKTFLSWYQQKPGKAPKLLIYLVSKLDSGVPSRFSGSGSGTDFTLTISSLQPEDFATYYCMQGTHFPLTFGQGTKVEIK

SEQ ID NO: 1068 - protein, 112 aa, synthetic construct
  REGION 1..112: note = Description of Artificial Sequence: Synthetic polypeptide
  REGION 1..112: note = Synthetic Construct
DIQMTQSPSSLSASVGDRVTITCKSSQSLLYSNGKTFLSWYQQKPGKAPKLLIYLVSKLDSGVPSRFSGSGSGTDFTFTISSLQPEDIATYYCMQGTHFPLTFGQGTKVEIK

SEQ ID NO: 1069 - protein, 112 aa, synthetic construct
  REGION 1..112: note = Description of Artificial Sequence: Synthetic polypeptide
  REGION 1..112: note = Synthetic Construct
EIVMTQSPATLSVSPGERATLSCKSSQSLLYSNGKTFLSWYQQKPGQAPRLLIYLVSKLDSGIPARFSGSGSGTEFTLTISSLQSEDFAVYYCMQGTHFPLTFGQGTKVEIK

SEQ ID NO: 1070 - protein, 112 aa, synthetic construct
  REGION 1..112: note = Description of Artificial Sequence: Synthetic polypeptide
  REGION 1..112: note = Synthetic Construct
EIVLTQSPATLSLSPGERATLSCKSSQSLLYSNGKTFLSWYQQKPGQAPRLLIYLVSKLDSGIPARFSGSGSGTDFTLTISSLEPEDFAVYYCMQGTHFPLTFGQGTKVEIK

SEQ ID NO: 1071 - protein, 112 aa, synthetic construct
  REGION 1..112: note = Description of Artificial Sequence: Synthetic polypeptide
  REGION 1..112: note = Synthetic Construct
EIVLTQSPGTLSLSPGERATLSCKSSQSLLYSNGKTFLSWYQQKPGQAPRLLIYLVSKLDSGIPDRFSGSGSGTDFTLTISRLEPEDFAVYYCMQGTHFPLTFGQGTKVEIK

SEQ ID NO: 1072 - protein, 112 aa, synthetic construct
  REGION 1..112: note = Description of Artificial Sequence: Synthetic polypeptide
  REGION 1..112: note = Synthetic Construct
  MOD_RES 3: note = Glutamic acid or Glutamine
DVXMTQTPLTLSVTIGQPASISCKSSQSLLDSDGKTYLNWLLQRPGQSPKRLIYLVSKLDSGVPDRFTGSGSGTDFTLKISRVEAEDLGVYYCWQGTHFPYTFGGGTKLEIK

SEQ ID NO: 1073 - protein, 112 aa, synthetic construct
  REGION 1..112: note = Description of Artificial Sequence: Synthetic polypeptide
  REGION 1..112: note = Synthetic Construct
DVVMTQSPLSLPVTLGQPASISCKSSQSLLDSDGKTYLNWFQQRPGQSPRRLIYLVSKLDSGVPDRFSGSGSGTDFTLKISRVEAEDVGVYYCWQGTHFPYTFGQGTKVEIK

SEQ ID NO: 1074 - protein, 112 aa, synthetic construct
  REGION 1..112: note = Description of Artificial Sequence: Synthetic polypeptide
  REGION 1..112: note = Synthetic Construct
DIVMTQSPLSLPVTPGEPASISCKSSQSLLDSDGKTYLNWYLQKPGQSPQLLIYLVSKLDSGVPDRFSGSGSGTDFTLKISRVEAEDVGVYYCWQGTHFPYTFGQGTKVEIK

SEQ ID NO: 1075 - protein, 112 aa, synthetic construct
  REGION 1..112: note = Description of Artificial Sequence: Synthetic polypeptide
  REGION 1..112: note = Synthetic Construct
DIVMTQSPDSLAVSLGERATINCKSSQSLLDSDGKTYLNWYQQKPGQPPKLLIYLVSKLDSGVPDRFSGSGSGTDFTLTISSLQAEDVAVYYCWQGTHFPYTFGQGTKVEIK

SEQ ID NO: 1076 - protein, 112 aa, synthetic construct
  REGION 1..112: note = Description of Artificial Sequence: Synthetic polypeptide
  REGION 1..112: note = Synthetic Construct
DIQLTQSPSFLSASVGDRVTITCKSSQSLLDSDGKTYLNWYQQKPGKAPKLLIYLVSKLDSGVPSRFSGSGSGTEFTLTISSLQPEDFATYYCWQGTHFPYTFGQGTKVEIK

SEQ ID NO: 1077 - protein, 112 aa, synthetic construct
  REGION 1..112: note = Description of Artificial Sequence: Synthetic polypeptide
  REGION 1..112: note = Synthetic Construct
DIQMTQSPSTLSASVGDRVTITCKSSQSLLDSDGKTYLNWYQQKPGKAPKLLIYLVSKLDSGVPSRFSGSGSGTEFTLTISSLQPDDFATYYCWQGTHFPYTFGQGTKVEIK

SEQ ID NO: 1078 - protein, 112 aa, synthetic construct
  REGION 1..112: note = Description of Artificial Sequence: Synthetic polypeptide
  REGION 1..112: note = Synthetic Construct
DIQMTQSPSSLSASVGDRVTITCKSSQSLLDSDGKTYLNWYQQKPGKAPKLLIYLVSKLDSGVPSRFSGSGSGTDFTLTISSLQPEDFATYYCWQGTHFPYTFGQGTKVEIK

SEQ ID NO: 1079 - protein, 112 aa, synthetic construct
  REGION 1..112: note = Description of Artificial Sequence: Synthetic polypeptide
  REGION 1..112: note = Synthetic Construct
DIQMTQSPSSLSASVGDRVTITCKSSQSLLDSDGKTYLNWYQQKPGKAPKLLIYLVSKLDSGVPSRFSGSGSGTDFTFTISSLQPEDIATYYCWQGTHFPYTFGQGTKVEIK

SEQ ID NO: 1080 - protein, 112 aa, synthetic construct
  REGION 1..112: note = Description of Artificial Sequence: Synthetic polypeptide
  REGION 1..112: note = Synthetic Construct
EIVLTQSPATLSLSPGERATLSCKSSQSLLDSDGKTYLNWYQQKPGQAPRLLIYLVSKLDSGIPARFSGSGSGTDFTLTISSLEPEDFAVYYCWQGTHFPYTFGQGTKVEIK

SEQ ID NO: 1081 - protein, 112 aa, synthetic construct
  REGION 1..112: note = Description of Artificial Sequence: Synthetic polypeptide
  REGION 1..112: note = Synthetic Construct
EIVMTQSPATLSVSPGERATLSCKSSQSLLDSDGKTYLNWYQQKPGQAPRLLIYLVSKLDSGIPARFSGSGSGTEFTLTISSLQSEDFAVYYCWQGTHFPYTFGQGTKVEIK

SEQ ID NO: 1082 - protein, 112 aa, synthetic construct
  REGION 1..112: note = Description of Artificial Sequence: Synthetic polypeptide
  REGION 1..112: note = Synthetic Construct
EIVLTQSPGTLSLSPGERATLSCKSSQSLLDSDGKTYLNWYQQKPGQAPRLLIYLVSKLDSGIPDRFSGSGSGTDFTLTISRLEPEDFAVYYCWQGTHFPYTFGQGTKVEIK

SEQ ID NO: 1083 - protein, 104 aa, synthetic construct
  REGION 1..104: note = Description of Artificial Sequence: Synthetic polypeptide
  REGION 1..104: note = Synthetic Construct
VLTQSPALMSASPGEKVTMTCSASSSVSYMYWYQQKPRSSPKPWIYLTSILASGVPARFSGSGSGTSYSLTINNMEAEDAATYYCQQWSFNPYTFGGGTKLVIK

SEQ ID NO: 1084 - protein, 106 aa, synthetic construct
  REGION 1..106: note = Description of Artificial Sequence: Synthetic polypeptide
  REGION 1..106: note = Synthetic Construct
EIVLTQSPATLSLSPGERATLSCSASSSVSYMYWYQQKPGQAPRLLIYLTSILASGIPARFSGSGSGTDFTLTISSLEPEDFAVYYCQQWSFNPYTFGQGTKVEIK

SEQ ID NO: 1085 - protein, 106 aa, synthetic construct
  REGION 1..106: note = Description of Artificial Sequence: Synthetic polypeptide
  REGION 1..106: note = Synthetic Construct
DIQMTQSPSSLSASVGDRVTITCSASSSVSYMYWYQQKPGKAPKLLIYLTSILASGVPSRFSGSGSGTDFTLTISSLQPEDFATYYCQQWSFNPYTFGQGTKVEIK

SEQ ID NO: 1086 - protein, 106 aa, synthetic construct
  REGION 1..106: note = Description of Artificial Sequence: Synthetic polypeptide
  REGION 1..106: note = Synthetic Construct
DIQMTQSPSTLSASVGDRVTITCSASSSVSYMYWYQQKPGKAPKLLIYLTSILASGVPSRFSGSGSGTEFTLTISSLQPDDFATYYCQQWSFNPYTFGQGTKVEIK

SEQ ID NO: 1087 - protein, 106 aa, synthetic construct
  REGION 1..106: note = Description of Artificial Sequence: Synthetic polypeptide
  REGION 1..106: note = Synthetic Construct
EIVMTQSPATLSVSPGERATLSCSASSSVSYMYWYQQKPGQAPRLLIYLTSILASGIPARFSGSGSGTEFTLTISSLQSEDFAVYYCQQWSFNPYTFGQGTKVEIK

SEQ ID NO: 1088 - protein, 106 aa, synthetic construct
  REGION 1..106: note = Description of Artificial Sequence: Synthetic polypeptide
  REGION 1..106: note = Synthetic Construct
DIQLTQSPSFLSASVGDRVTITCSASSSVSYMYWYQQKPGKAPKLLIYLTSILASGVPSRFSGSGSGTEFTLTISSLQPEDFATYYCQQWSFNPYTFGQGTKVEIK

SEQ ID NO: 1089 - protein, 106 aa, synthetic construct
  REGION 1..106: note = Description of Artificial Sequence: Synthetic polypeptide
  REGION 1..106: note = Synthetic Construct
DIQMTQSPSSLSASVGDRVTITCSASSSVSYMYWYQQKPGKAPKLLIYLTSILASGVPSRFSGSGSGTDFTFTISSLQPEDIATYYCQQWSFNPYTFGQGTKVEIK

SEQ ID NO: 1090 - protein, 106 aa, synthetic construct
  REGION 1..106: note = Description of Artificial Sequence: Synthetic polypeptide
  REGION 1..106: note = Synthetic Construct
EIVLTQSPGTLSLSPGERATLSCSASSSVSYMYWYQQKPGQAPRLLIYLTSILASGIPDRFSGSGSGTDFTLTISRLEPEDFAVYYCQQWSFNPYTFGQGTKVEIK

SEQ ID NO: 1091 - protein, 106 aa, synthetic construct
  REGION 1..106: note = Description of Artificial Sequence: Synthetic polypeptide
  REGION 1..106: note = Synthetic Construct
DIVMTQSPLSLPVTPGEPASISCSASSSVSYMYWYLQKPGQSPQLLIYLTSILASGVPDRFSGSGSGTDFTLKISRVEAEDVGVYYCQQWSFNPYTFGQGTKVEIK

SEQ ID NO: 1092 - protein, 106 aa, synthetic construct
  REGION 1..106: note = Description of Artificial Sequence: Synthetic polypeptide
  REGION 1..106: note = Synthetic Construct
DVVMTQSPLSLPVTLGQPASISCSASSSVSYMYWFQQRPGQSPRRLIYLTSILASGVPDRFSGSGSGTDFTLKISRVEAEDVGVYYCQQWSFNPYTFGQGTKVEIK

SEQ ID NO: 1093 - protein, 106 aa, synthetic construct
  REGION 1..106: note = Description of Artificial Sequence: Synthetic polypeptide
  REGION 1..106: note = Synthetic Construct
DIVMTQSPDSLAVSLGERATINCSASSSVSYMYWYQQKPGQPPKLLIYLTSILASGVPDRFSGSGSGTDFTLTISSLQAEDVAVYYCQQWSFNPYTFGQGTKVEIK

SEQ ID NO: 1094 - protein, 112 aa, synthetic construct
  REGION 1..112: note = Description of Artificial Sequence: Synthetic polypeptide
  REGION 1..112: note = Synthetic Construct
  MOD_RES 3: note = Glutamic acid or Glutamine
DVXMTQTPLSLPVSLGDQASISCRSSQSLVHSNGNTYLHWYLQKPGQSPKLLIYKVSNRFSGVPDRFSGSGSGTDFTLKISRVEAEDLGVYFCSQSTHVPLTFGAGTKLELK

SEQ ID NO: 1095 - protein, 112 aa, synthetic construct
  REGION 1..112: note = Description of Artificial Sequence: Synthetic polypeptide
  REGION 1..112: note = Synthetic Construct
DVVMTQSPLSLPVTLGQPASISCRSSQSLVHSNGNTYLHWFQQRPGQSPRRLIYKVSNRFSGVPDRFSGSGSGTDFTLKISRVEAEDVGVYYCSQSTHVPLTFGQGTKVEIK

SEQ ID NO: 1096 - protein, 112 aa, synthetic construct
  REGION 1..112: note = Description of Artificial Sequence: Synthetic polypeptide
  REGION 1..112: note = Synthetic Construct
DIVMTQSPLSLPVTPGEPASISCRSSQSLVHSNGNTYLHWYLQKPGQSPQLLIYKVSNRFSGVPDRFSGSGSGTDFTLKISRVEAEDVGVYYCSQSTHVPLTFGQGTKVEIK

SEQ ID NO: 1097 - protein, 112 aa, synthetic construct
  REGION 1..112: note = Description of Artificial Sequence: Synthetic polypeptide
  REGION 1..112: note = Synthetic Construct
DIVMTQSPDSLAVSLGERATINCRSSQSLVHSNGNTYLHWYQQKPGQPPKLLIYKVSNRFSGVPDRFSGSGSGTDFTLTISSLQAEDVAVYYCSQSTHVPLTFGQGTKVEIK

SEQ ID NO: 1098 - protein, 112 aa, synthetic construct
  REGION 1..112: note = Description of Artificial Sequence: Synthetic polypeptide
  REGION 1..112: note = Synthetic Construct
EIVLTQSPATLSLSPGERATLSCRSSQSLVHSNGNTYLHWYQQKPGQAPRLLIYKVSNRFSGIPARFSGSGSGTDFTLTISSLEPEDFAVYYCSQSTHVPLTFGQGTKVEIK

SEQ ID NO: 1099 - protein, 112 aa, synthetic construct
  REGION 1..112: note = Description of Artificial Sequence: Synthetic polypeptide
  REGION 1..112: note = Synthetic Construct
DIQMTQSPSSLSASVGDRVTITCRSSQSLVHSNGNTYLHWYQQKPGKAPKLLIYKVSNRFSGVPSRFSGSGSGTDFTLTISSLQPEDFATYYCSQSTHVPLTFGQGTKVEIK

SEQ ID NO: 1100 - protein, 112 aa, synthetic construct
  REGION 1..112: note = Description of Artificial Sequence: Synthetic polypeptide
  REGION 1..112: note = Synthetic Construct
DIQMTQSPSSLSASVGDRVTITCRSSQSLVHSNGNTYLHWYQQKPGKAPKLLIYKVSNRFSGVPSRFSGSGSGTDFTFTISSLQPEDIATYYCSQSTHVPLTFGQGTKVEIK

SEQ ID NO: 1101 - protein, 112 aa, synthetic construct
  REGION 1..112: note = Description of Artificial Sequence: Synthetic polypeptide
  REGION 1..112: note = Synthetic Construct
EIVMTQSPATLSVSPGERATLSCRSSQSLVHSNGNTYLHWYQQKPGQAPRLLIYKVSNRFSGIPARFSGSGSGTEFTLTISSLQSEDFAVYYCSQSTHVPLTFGQGTKVEIK

SEQ ID NO: 1102 - protein, 112 aa, synthetic construct
  REGION 1..112: note = Description of Artificial Sequence: Synthetic polypeptide
  REGION 1..112: note = Synthetic Construct
DIQMTQSPSTLSASVGDRVTITCRSSQSLVHSNGNTYLHWYQQKPGKAPKLLIYKVSNRFSGVPSRFSGSGSGTEFTLTISSLQPDDFATYYCSQSTHVPLTFGQGTKVEIK

SEQ ID NO: 1103 - protein, 112 aa, synthetic construct
  REGION 1..112: note = Description of Artificial Sequence: Synthetic polypeptide
  REGION 1..112: note = Synthetic Construct
DIQLTQSPSFLSASVGDRVTITCRSSQSLVHSNGNTYLHWYQQKPGKAPKLLIYKVSNRFSGVPSRFSGSGSGTEFTLTISSLQPEDFATYYCSQSTHVPLTFGQGTKVEIK

SEQ ID NO: 1104 - protein, 112 aa, synthetic construct
  REGION 1..112: note = Description of Artificial Sequence: Synthetic polypeptide
  REGION 1..112: note = Synthetic Construct
EIVLTQSPGTLSLSPGERATLSCRSSQSLVHSNGNTYLHWYQQKPGQAPRLLIYKVSNRFSGIPDRFSGSGSGTDFTLTISRLEPEDFAVYYCSQSTHVPLTFGQGTKVEIK

SEQ ID NO: 1105 - protein, 104 aa, synthetic construct
  REGION 1..104: note = Description of Artificial Sequence: Synthetic polypeptide
  REGION 1..104: note = Synthetic Construct
  MOD_RES 10: note = Glutamic acid or Glutamine
VLTQSPAIMXASPGEKVTMTCSASSSVSYMYWYQQKPRSSPKPWIYLTSILASGVPARFSGSGSGTSYSLTISSMEAEDAATYYCQQWSFNPYTFGGGTKLVIK

SEQ ID NO: 1106 - protein, 105 aa, synthetic construct
  REGION 1..105: note = Description of Artificial Sequence: Synthetic polypeptide
  REGION 1..105: note = Synthetic Construct
NVLTQSPALMSASPGEKVTMTCSASSSVSYMYWYQQKPRSSPKPWIYLTSILASGVPARFSGSGSGTSYSLTISSMEAEDAATYYCQQWSFNPYTFGGGTKLVIK

SEQ ID NO: 1107 - protein, 112 aa, synthetic construct
  REGION 1..112: note = Description of Artificial Sequence: Synthetic polypeptide
  REGION 1..112: note = Synthetic Construct
DVVMTQTPLSLPVSLGDQASISCRSSQTIIHSNGNTYLEWYLRKPGQSPKLLIYKVSNRFSGVPDRFSGSGSGTDFTLKISRVEAEDLGVYYCFQGSHVPYTFGGGTELEIK

SEQ ID NO: 1108 - protein, 112 aa, synthetic construct
  REGION 1..112: note = Description of Artificial Sequence: Synthetic polypeptide
  REGION 1..112: note = Synthetic Construct
DVVMTQSPLSLPVTLGQPASISCRSSQTIIHSNGNTYLEWFQQRPGQSPRRLIYKVSNRFSGVPDRFSGSGSGTDFTLKISRVEAEDVGVYYCFQGSHVPYTFGQGTKVEIK

SEQ ID NO: 1109 - protein, 112 aa, synthetic construct
  REGION 1..112: note = Description of Artificial Sequence: Synthetic polypeptide
  REGION 1..112: note = Synthetic Construct
DIVMTQSPLSLPVTPGEPASISCRSSQTIIHSNGNTYLEWYLQKPGQSPQLLIYKVSNRFSGVPDRFSGSGSGTDFTLKISRVEAEDVGVYYCFQGSHVPYTFGQGTKVEIK

SEQ ID NO: 1110 - protein, 112 aa, synthetic construct
  REGION 1..112: note = Description of Artificial Sequence: Synthetic polypeptide
  REGION 1..112: note = Synthetic Construct
DIVMTQSPDSLAVSLGERATINCRSSQTIIHSNGNTYLEWYQQKPGQPPKLLIYKVSNRFSGVPDRFSGSGSGTDFTLTISSLQAEDVAVYYCFQGSHVPYTFGQGTKVEIK

SEQ ID NO: 1111 - protein, 112 aa, synthetic construct
  REGION 1..112: note = Description of Artificial Sequence: Synthetic polypeptide
  REGION 1..112: note = Synthetic Construct
EIVLTQSPATLSLSPGERATLSCRSSQTIIHSNGNTYLEWYQQKPGQAPRLLIYKVSNRFSGIPARFSGSGSGTDFTLTISSLEPEDFAVYYCFQGSHVPYTFGQGTKVEIK

SEQ ID NO: 1112 - protein, 112 aa, synthetic construct
  REGION 1..112: note = Description of Artificial Sequence: Synthetic polypeptide
  REGION 1..112: note = Synthetic Construct
DIQLTQSPSFLSASVGDRVTITCRSSQTIIHSNGNTYLEWYQQKPGKAPKLLIYKVSNRFSGVPSRFSGSGSGTEFTLTISSLQPEDFATYYCFQGSHVPYTFGQGTKVEIK

SEQ ID NO: 1113 - protein, 112 aa, synthetic construct
  REGION 1..112: note = Description of Artificial Sequence: Synthetic polypeptide
  REGION 1..112: note = Synthetic Construct
DIQMTQSPSSLSASVGDRVTITCRSSQTIIHSNGNTYLEWYQQKPGKAPKLLIYKVSNRFSGVPSRFSGSGSGTDFTFTISSLQPEDIATYYCFQGSHVPYTFGQGTKVEIK

SEQ ID NO: 1114 - protein, 112 aa, synthetic construct
  REGION 1..112: note = Description of Artificial Sequence: Synthetic polypeptide
  REGION 1..112: note = Synthetic Construct
DIQMTQSPSSLSASVGDRVTITCRSSQTIIHSNGNTYLEWYQQKPGKAPKLLIYKVSNRFSGVPSRFSGSGSGTDFTLTISSLQPEDFATYYCFQGSHVPYTFGQGTKVEIK

SEQ ID NO: 1115 - protein, 112 aa, synthetic construct
  REGION 1..112: note = Description of Artificial Sequence: Synthetic polypeptide
  REGION 1..112: note = Synthetic Construct
EIVMTQSPATLSVSPGERATLSCRSSQTIIHSNGNTYLEWYQQKPGQAPRLLIYKVSNRFSGIPARFSGSGSGTEFTLTISSLQSEDFAVYYCFQGSHVPYTFGQGTKVEIK

SEQ ID NO: 1116 - protein, 112 aa, synthetic construct
  REGION 1..112: note = Description of Artificial Sequence: Synthetic polypeptide
  REGION 1..112: note = Synthetic Construct
DIQMTQSPSTLSASVGDRVTITCRSSQTIIHSNGNTYLEWYQQKPGKAPKLLIYKVSNRFSGVPSRFSGSGSGTEFTLTISSLQPDDFATYYCFQGSHVPYTFGQGTKVEIK

SEQ ID NO: 1117 - protein, 112 aa, synthetic construct
  REGION 1..112: note = Description of Artificial Sequence: Synthetic polypeptide
  REGION 1..112: note = Synthetic Construct
EIVLTQSPGTLSLSPGERATLSCRSSQTIIHSNGNTYLEWYQQKPGQAPRLLIYKVSNRFSGIPDRFSGSGSGTDFTLTISRLEPEDFAVYYCFQGSHVPYTFGQGTKVEIK

SEQ ID NO: 1118 - protein, 112 aa, synthetic construct
  REGION 1..112: note = Description of Artificial Sequence: Synthetic polypeptide
  REGION 1..112: note = Synthetic Construct
  MOD_RES 78: note = Glutamic acid or Glutamine
DVVMTQTPLTLSVTIGQPASISCKSSQSLLYSNGKTFLSWLLQRPGQSPKRLIYLVSKLDSGVPDRFAGSGSGTDFTXKISRLEADDLGIYYCMQGTHFPLTFGGGTKLEMK

SEQ ID NO: 1119 - protein, 112 aa, synthetic construct
  REGION 1..112: note = Description of Artificial Sequence: Synthetic polypeptide
  REGION 1..112: note = Synthetic Construct
ITMSQSPSSLAVSVGEKVTMSCKSSQSLLYSSDQKNYLAWYQQKPGQSPKLLIYWASTRESGVPDRFTGSGSGTDFTLTISSVKAEDLAVYCCQQYYSYPLTFGAGTKLELK

SEQ ID NO: 1120 - protein, 113 aa, synthetic construct
  REGION 1..113: note = Description of Artificial Sequence: Synthetic polypeptide
  REGION 1..113: note = Synthetic Construct
DIVMTQSPDSLAVSLGERATINCKSSQSLLYSSDQKNYLAWYQQKPGQPPKLLIYWASTRESGVPDRFSGSGSGTDFTLTISSLQAEDVAVYYCQQYYSYPLTFGQGTKVEIK

SEQ ID NO: 1121 - protein, 113 aa, synthetic construct
  REGION 1..113: note = Description of Artificial Sequence: Synthetic polypeptide
  REGION 1..113: note = Synthetic Construct
DIVMTQSPLSLPVTPGEPASISCKSSQSLLYSSDQKNYLAWYLQKPGQSPQLLIYWASTRESGVPDRFSGSGSGTDFTLKISRVEAEDVGVYYCQQYYSYPLTFGQGTKVEIK

SEQ ID NO: 1122 - protein, 113 aa, synthetic construct
  REGION 1..113: note = Description of Artificial Sequence: Synthetic polypeptide
  REGION 1..113: note = Synthetic Construct
DVVMTQSPLSLPVTLGQPASISCKSSQSLLYSSDQKNYLAWFQQRPGQSPRRLIYWASTRESGVPDRFSGSGSGTDFTLKISRVEAEDVGVYYCQQYYSYPLTFGQGTKVEIK

SEQ ID NO: 1123 - protein, 113 aa, synthetic construct
  REGION 1..113: note = Description of Artificial Sequence: Synthetic polypeptide
  REGION 1..113: note = Synthetic Construct
DIQMTQSPSTLSASVGDRVTITCKSSQSLLYSSDQKNYLAWYQQKPGKAPKLLIYWASTRESGVPSRFSGSGSGTEFTLTISSLQPDDFATYYCQQYYSYPLTFGQGTKVEIK

SEQ ID NO: 1124 - protein, 113 aa, synthetic construct
  REGION 1..113: note = Description of Artificial Sequence: Synthetic polypeptide
  REGION 1..113: note = Synthetic Construct
DIQLTQSPSFLSASVGDRVTITCKSSQSLLYSSDQKNYLAWYQQKPGKAPKLLIYWASTRESGVPSRFSGSGSGTEFTLTISSLQPEDFATYYCQQYYSYPLTFGQGTKVEIK

SEQ ID NO: 1125 - protein, 113 aa, synthetic construct
  REGION 1..113: note = Description of Artificial Sequence: Synthetic polypeptide
  REGION 1..113: note = Synthetic Construct
EIVMTQSPATLSVSPGERATLSCKSSQSLLYSSDQKNYLAWYQQKPGQAPRLLIYWASTRESGIPARFSGSGSGTEFTLTISSLQSEDFAVYYCQQYYSYPLTFGQGTKVEIK

SEQ ID NO: 1126 - protein, 113 aa, synthetic construct
  REGION 1..113: note = Description of Artificial Sequence: Synthetic polypeptide
  REGION 1..113: note = Synthetic Construct
DIQMTQSPSSLSASVGDRVTITCKSSQSLLYSSDQKNYLAWYQQKPGKAPKLLIYWASTRESGVPSRFSGSGSGTDFTLTISSLQPEDFATYYCQQYYSYPLTFGQGTKVEIK

SEQ ID NO: 1127 - protein, 113 aa, synthetic construct
  REGION 1..113: note = Description of Artificial Sequence: Synthetic polypeptide
  REGION 1..113: note = Synthetic Construct
EIVLTQSPATLSLSPGERATLSCKSSQSLLYSSDQKNYLAWYQQKPGQAPRLLIYWASTRESGIPARFSGSGSGTDFTLTISSLEPEDFAVYYCQQYYSYPLTFGQGTKVEIK

SEQ ID NO: 1128 - protein, 113 aa, synthetic construct
  REGION 1..113: note = Description of Artificial Sequence: Synthetic polypeptide
  REGION 1..113: note = Synthetic Construct
DIQMTQSPSSLSASVGDRVTITCKSSQSLLYSSDQKNYLAWYQQKPGKAPKLLIYWASTRESGVPSRFSGSGSGTDFTFTISSLQPEDIATYYCQQYYSYPLTFGQGTKVEIK

SEQ ID NO: 1129 - protein, 113 aa, synthetic construct
  REGION 1..113: note = Description of Artificial Sequence: Synthetic polypeptide
  REGION 1..113: note = Synthetic Construct
EIVLTQSPGTLSLSPGERATLSCKSSQSLLYSSDQKNYLAWYQQKPGQAPRLLIYWASTRESGIPDRFSGSGSGTDFTLTISRLEPEDFAVYYCQQYYSYPLTFGQGTKVEIK

SEQ ID NO: 1130 - protein, 112 aa, synthetic construct
  REGION 1..112: note = Description of Artificial Sequence: Synthetic polypeptide
  REGION 1..112: note = Synthetic Construct
  MOD_RES 3: note = Glutamic acid or Glutamine
DVXMTQTPLSLPVSLGDQASISCRSSQTIIHSNGNTYLEWYLRKPGQSPKLLIYKVSNRFSGVPDRFSGSGSGTDFTLKISRVEGEDLGVYYCFQGSHVPYTFGGGTELEIK

SEQ ID NO: 1131 - protein, 105 aa, synthetic construct
  REGION 1..105: note = Description of Artificial Sequence: Synthetic polypeptide
  REGION 1..105: note = Synthetic Construct
  MOD_RES 10: note = Glutamic acid or Glutamine
  MOD_RES 12: note = Glutamic acid or Glutamine
  MOD_RES 76: note = Any naturally occurring amino acid
QMSQSPACLXAXVGESVTITCRASENIYSYLAWYQQKQGKSPKLVVYKAKTLAEGVPSRFSGRGSGTQFFLKINSXQREDFGSYYCQHHYGTPFTFGSGTKLEIK

SEQ ID NO: 1132 - protein, 107 aa, synthetic construct
  REGION 1..107: note = Description of Artificial Sequence: Synthetic polypeptide
  REGION 1..107: note = Synthetic Construct
DIQLTQSPSFLSASVGDRVTITCRASENIYSYLAWYQQKPGKAPKLLIYKAKTLAEGVPSRFSGSGSGTEFTLTISSLQPEDFATYYCQHHYGTPFTFGQGTKVEIK

SEQ ID NO: 1133 - protein, 107 aa, synthetic construct
  REGION 1..107: note = Description of Artificial Sequence: Synthetic polypeptide
  REGION 1..107: note = Synthetic Construct
EIVLTQSPATLSLSPGERATLSCRASENIYSYLAWYQQKPGQAPRLLIYKAKTLAEGIPARFSGSGSGTDFTLTISSLEPEDFAVYYCQHHYGTPFTFGQGTKVEIK

SEQ ID NO: 1134 - protein, 107 aa, synthetic construct
  REGION 1..107: note = Description of Artificial Sequence: Synthetic polypeptide
  REGION 1..107: note = Synthetic Construct
DIQMTQSPSTLSASVGDRVTITCRASENIYSYLAWYQQKPGKAPKLLIYKAKTLAEGVPSRFSGSGSGTEFTLTISSLQPDDFATYYCQHHYGTPFTFGQGTKVEIK

SEQ ID NO: 1135 - protein, 107 aa, synthetic construct
  REGION 1..107: note = Description of Artificial Sequence: Synthetic polypeptide
  REGION 1..107: note = Synthetic Construct
EIVMTQSPATLSVSPGERATLSCRASENIYSYLAWYQQKPGQAPRLLIYKAKTLAEGIPARFSGSGSGTEFTLTISSLQSEDFAVYYCQHHYGTPFTFGQGTKVEIK

SEQ ID NO: 1136 - protein, 107 aa, synthetic construct
  REGION 1..107: note = Description of Artificial Sequence: Synthetic polypeptide
  REGION 1..107: note = Synthetic Construct
DIQMTQSPSSLSASVGDRVTITCRASENIYSYLAWYQQKPGKAPKLLIYKAKTLAEGVPSRFSGSGSGTDFTLTISSLQPEDFATYYCQHHYGTPFTFGQGTKVEIK

SEQ ID NO: 1137 - protein, 107 aa, synthetic construct
  REGION 1..107: note = Description of Artificial Sequence: Synthetic polypeptide
  REGION 1..107: note = Synthetic Construct
DIQMTQSPSSLSASVGDRVTITCRASENIYSYLAWYQQKPGKAPKLLIYKAKTLAEGVPSRFSGSGSGTDFTFTISSLQPEDIATYYCQHHYGTPFTFGQGTKVEIK

SEQ ID NO: 1138 - protein, 107 aa, synthetic construct
  REGION 1..107: note = Description of Artificial Sequence: Synthetic polypeptide
  REGION 1..107: note = Synthetic Construct
EIVLTQSPGTLSLSPGERATLSCRASENIYSYLAWYQQKPGQAPRLLIYKAKTLAEGIPDRFSGSGSGTDFTLTISRLEPEDFAVYYCQHHYGTPFTFGQGTKVEIK

SEQ ID NO: 1139 - protein, 107 aa, synthetic construct
  REGION 1..107: note = Description of Artificial Sequence: Synthetic polypeptide
  REGION 1..107: note = Synthetic Construct
DIVMTQSPLSLPVTPGEPASISCRASENIYSYLAWYLQKPGQSPQLLIYKAKTLAEGVPDRFSGSGSGTDFTLKISRVEAEDVGVYYCQHHYGTPFTFGQGTKVEIK

SEQ ID NO: 1140 - protein, 107 aa, synthetic construct
  REGION 1..107: note = Description of Artificial Sequence: Synthetic polypeptide
  REGION 1..107: note = Synthetic Construct
DIVMTQSPDSLAVSLGERATINCRASENIYSYLAWYQQKPGQPPKLLIYKAKTLAEGVPDRFSGSGSGTDFTLTISSLQAEDVAVYYCQHHYGTPFTFGQGTKVEIK

SEQ ID NO: 1141 - protein, 107 aa, synthetic construct
  REGION 1..107: note = Description of Artificial Sequence: Synthetic polypeptide
  REGION 1..107: note = Synthetic Construct
DVVMTQSPLSLPVTLGQPASISCRASENIYSYLAWFQQRPGQSPRRLIYKAKTLAEGVPDRFSGSGSGTDFTLKISRVEAEDVGVYYCQHHYGTPFTFGQGTKVEIK

SEQ ID NO: 1142 - protein, 107 aa, synthetic construct
  REGION 1..107: note = Description of Artificial Sequence: Synthetic polypeptide
  REGION 1..107: note = Synthetic Construct
DIQMTQSPASLSVSVGETVTITCRTSENVYSNLAWYQQKQGKSPQLLVYAATNLADGVPSRFSASGSATQFSLKINSLQSADFGSYYCHHFWGTPYTFGGGTKLEMN

SEQ ID NO: 1143 - protein, 107 aa, synthetic construct
  REGION 1..107: note = Description of Artificial Sequence: Synthetic polypeptide
  REGION 1..107: note = Synthetic Construct
EIVMTQSPATLSVSPGERATLSCRTSENVYSNLAWYQQKPGQAPRLLIYAATNLADGIPARFSGSGSGTEFTLTISSLQSEDFAVYYCHHFWGTPYTFGQGTKVEIK

SEQ ID NO: 1144 - protein, 107 aa, synthetic construct
  REGION 1..107: note = Description of Artificial Sequence: Synthetic polypeptide
  REGION 1..107: note = Synthetic Construct
EIVLTQSPATLSLSPGERATLSCRTSENVYSNLAWYQQKPGQAPRLLIYAATNLADGIPARFSGSGSGTDFTLTISSLEPEDFAVYYCHHFWGTPYTFGQGTKVEIK

SEQ ID NO: 1145 - protein, 107 aa, synthetic construct
  REGION 1..107: note = Description of Artificial Sequence: Synthetic polypeptide
  REGION 1..107: note = Synthetic Construct
DIQLTQSPSFLSASVGDRVTITCRTSENVYSNLAWYQQKPGKAPKLLIYAATNLADGVPSRFSGSGSGTEFTLTISSLQPEDFATYYCHHFWGTPYTFGQGTKVEIK

SEQ ID NO: 1146 - protein, 107 aa, synthetic construct
  REGION 1..107: note = Description of Artificial Sequence: Synthetic polypeptide
  REGION 1..107: note = Synthetic Construct
DIQMTQSPSTLSASVGDRVTITCRTSENVYSNLAWYQQKPGKAPKLLIYAATNLADGVPSRFSGSGSGTEFTLTISSLQPDDFATYYCHHFWGTPYTFGQGTKVEIK

SEQ ID NO: 1147 - protein, 107 aa, synthetic construct
  REGION 1..107: note = Description of Artificial Sequence: Synthetic polypeptide
  REGION 1..107: note = Synthetic Construct
DIQMTQSPSSLSASVGDRVTITCRTSENVYSNLAWYQQKPGKAPKLLIYAATNLADGVPSRFSGSGSGTDFTLTISSLQPEDFATYYCHHFWGTPYTFGQGTKVEIK

SEQ ID NO: 1148 - protein, 107 aa, synthetic construct
  REGION 1..107: note = Description of Artificial Sequence: Synthetic polypeptide
  REGION 1..107: note = Synthetic Construct
DIQMTQSPSSLSASVGDRVTITCRTSENVYSNLAWYQQKPGKAPKLLIYAATNLADGVPSRFSGSGSGTDFTFTISSLQPEDIATYYCHHFWGTPYTFGQGTKVEIK

SEQ ID NO: 1149 - protein, 107 aa, synthetic construct
  REGION 1..107: note = Description of Artificial Sequence: Synthetic polypeptide
  REGION 1..107: note = Synthetic Construct
EIVLTQSPGTLSLSPGERATLSCRTSENVYSNLAWYQQKPGQAPRLLIYAATNLADGIPDRFSGSGSGTDFTLTISRLEPEDFAVYYCHHFWGTPYTFGQGTKVEIK

SEQ ID NO: 1150 - protein, 107 aa, synthetic construct
  REGION 1..107: note = Description of Artificial Sequence: Synthetic polypeptide
  REGION 1..107: note = Synthetic Construct
DIVMTQSPLSLPVTPGEPASISCRTSENVYSNLAWYLQKPGQSPQLLIYAATNLADGVPDRFSGSGSGTDFTLKISRVEAEDVGVYYCHHFWGTPYTFGQGTKVEIK

SEQ ID NO: 1151 - protein, 107 aa, synthetic construct
  REGION 1..107: note = Description of Artificial Sequence: Synthetic polypeptide
  REGION 1..107: note = Synthetic Construct
DVVMTQSPLSLPVTLGQPASISCRTSENVYSNLAWFQQRPGQSPRRLIYAATNLADGVPDRFSGSGSGTDFTLKISRVEAEDVGVYYCHHFWGTPYTFGQGTKVEIK

SEQ ID NO: 1152 - protein, 107 aa, synthetic construct
  REGION 1..107: note = Description of Artificial Sequence: Synthetic polypeptide
  REGION 1..107: note = Synthetic Construct
DIVMTQSPDSLAVSLGERATINCRTSENVYSNLAWYQQKPGQPPKLLIYAATNLADGVPDRFSGSGSGTDFTLTISSLQAEDVAVYYCHHFWGTPYTFGQGTKVEIK

SEQ ID NO: 1153 - protein, 112 aa, synthetic construct
  REGION 1..112: note = Description of Artificial Sequence: Synthetic polypeptide
  REGION 1..112: note = Synthetic Construct
  MOD_RES 3: note = Glutamic acid or Glutamine
DVXMTQNPLSLPVSLGDQASISCRSSQSLVHSNGYTYLHWYLQKPGQSPKLLIYKVSNRFSGVPDRFSGSGSGTDFTLKISRVEADDLGVYLCSQSTRVPYTFGGGTKLEIK

SEQ ID NO: 1154 - protein, 112 aa, synthetic construct
  REGION 1..112: note = Description of Artificial Sequence: Synthetic polypeptide
  REGION 1..112: note = Synthetic Construct
DVVMTQSPLSLPVTLGQPASISCRSSQSLVHSNGYTYLHWFQQRPGQSPRRLIYKVSNRFSGVPDRFSGSGSGTDFTLKISRVEAEDVGVYYCSQSTRVPYTFGQGTKVEIK

SEQ ID NO: 1155 - protein, 112 aa, synthetic construct
  REGION 1..112: note = Description of Artificial Sequence: Synthetic polypeptide
  REGION 1..112: note = Synthetic Construct
DIVMTQSPLSLPVTPGEPASISCRSSQSLVHSNGYTYLHWYLQKPGQSPQLLIYKVSNRFSGVPDRFSGSGSGTDFTLKISRVEAEDVGVYYCSQSTRVPYTFGQGTKVEIK

SEQ ID NO: 1156 - protein, 112 aa, synthetic construct
  REGION 1..112: note = Description of Artificial Sequence: Synthetic polypeptide
  REGION 1..112: note = Synthetic Construct
DIVMTQSPDSLAVSLGERATINCRSSQSLVHSNGYTYLHWYQQKPGQPPKLLIYKVSNRFSGVPDRFSGSGSGTDFTLTISSLQAEDVAVYYCSQSTRVPYTFGQGTKVEIK

SEQ ID NO: 1157 - protein, 112 aa, synthetic construct
  REGION 1..112: note = Description of Artificial Sequence: Synthetic polypeptide
  REGION 1..112: note = Synthetic Construct
EIVLTQSPATLSLSPGERATLSCRSSQSLVHSNGYTYLHWYQQKPGQAPRLLIYKVSNRFSGIPARFSGSGSGTDFTLTISSLEPEDFAVYYCSQSTRVPYTFGQGTKVEIK

SEQ ID NO: 1158 - protein, 112 aa, synthetic construct
  REGION 1..112: note = Description of Artificial Sequence: Synthetic polypeptide
  REGION 1..112: note = Synthetic Construct
DIQMTQSPSSLSASVGDRVTITCRSSQSLVHSNGYTYLHWYQQKPGKAPKLLIYKVSNRFSGVPSRFSGSGSGTDFTFTISSLQPEDIATYYCSQSTRVPYTFGQGTKVEIK

SEQ ID NO: 1159 - protein, 112 aa, synthetic construct
  REGION 1..112: note = Description of Artificial Sequence: Synthetic polypeptide
  REGION 1..112: note = Synthetic Construct
EIVMTQSPATLSVSPGERATLSCRSSQSLVHSNGYTYLHWYQQKPGQAPRLLIYKVSNRFSGIPARFSGSGSGTEFTLTISSLQSEDFAVYYCSQSTRVPYTFGQGTKVEIK

SEQ ID NO: 1160 - protein, 112 aa, synthetic construct
  REGION 1..112: note = Description of Artificial Sequence: Synthetic polypeptide
  REGION 1..112: note = Synthetic Construct
DIQMTQSPSTLSASVGDRVTITCRSSQSLVHSNGYTYLHWYQQKPGKAPKLLIYKVSNRFSGVPSRFSGSGSGTEFTLTISSLQPDDFATYYCSQSTRVPYTFGQGTKVEIK

SEQ ID NO: 1161 - protein, 112 aa, synthetic construct
  REGION 1..112: note = Description of Artificial Sequence: Synthetic polypeptide
  REGION 1..112: note = Synthetic Construct
DIQMTQSPSSLSASVGDRVTITCRSSQSLVHSNGYTYLHWYQQKPGKAPKLLIYKVSNRFSGVPSRFSGSGSGTDFTLTISSLQPEDFATYYCSQSTRVPYTFGQGTKVEIK

SEQ ID NO: 1162 - protein, 112 aa, synthetic construct
  REGION 1..112: note = Description of Artificial Sequence: Synthetic polypeptide
  REGION 1..112: note = Synthetic Construct
DIQLTQSPSFLSASVGDRVTITCRSSQSLVHSNGYTYLHWYQQKPGKAPKLLIYKVSNRFSGVPSRFSGSGSGTEFTLTISSLQPEDFATYYCSQSTRVPYTFGQGTKVEIK

SEQ ID NO: 1163 - protein, 112 aa, synthetic construct
  REGION 1..112: note = Description of Artificial Sequence: Synthetic polypeptide
  REGION 1..112: note = Synthetic Construct
EIVLTQSPGTLSLSPGERATLSCRSSQSLVHSNGYTYLHWYQQKPGQAPRLLIYKVSNRFSGIPDRFSGSGSGTDFTLTISRLEPEDFAVYYCSQSTRVPYTFGQGTKVEIK

SEQ ID NO: 1164 - protein, 112 aa, synthetic construct
  REGION 1..112: note = Description of Artificial Sequence: Synthetic polypeptide
  REGION 1..112: note = Synthetic Construct
DVLMTQTPLSLPVSLGDQASISCRFSQSLVHSNGNTYLHWYLQKPGQSPKLLIYKVSNRFSGVPDRFSGSGSGTDFTLRISGVEAEDLGVYFCSQSTRVPPTFGGGTKLEIK

SEQ ID NO: 1165 - protein, 112 aa, synthetic construct
  REGION 1..112: note = Description of Artificial Sequence: Synthetic polypeptide
  REGION 1..112: note = Synthetic Construct
DVVMTQSPLSLPVTLGQPASISCRFSQSLVHSNGNTYLHWFQQRPGQSPRRLIYKVSNRFSGVPDRFSGSGSGTDFTLKISRVEAEDVGVYYCSQSTRVPPTFGQGTKVEIK

SEQ ID NO: 1166 - protein, 112 aa, synthetic construct
  REGION 1..112: note = Description of Artificial Sequence: Synthetic polypeptide
  REGION 1..112: note = Synthetic Construct
DIVMTQSPLSLPVTPGEPASISCRFSQSLVHSNGNTYLHWYLQKPGQSPQLLIYKVSNRFSGVPDRFSGSGSGTDFTLKISRVEAEDVGVYYCSQSTRVPPTFGQGTKVEIK

SEQ ID NO: 1167 - protein, 112 aa, synthetic construct
  REGION 1..112: note = Description of Artificial Sequence: Synthetic polypeptide
  REGION 1..112: note = Synthetic Construct
DIVMTQSPDSLAVSLGERATINCRFSQSLVHSNGNTYLHWYQQKPGQPPKLLIYKVSNRFSGVPDRFSGSGSGTDFTLTISSLQAEDVAVYYCSQSTRVPPTFGQGTKVEIK

SEQ ID NO: 1168 - protein, 112 aa, synthetic construct
  REGION 1..112: note = Description of Artificial Sequence: Synthetic polypeptide
  REGION 1..112: note = Synthetic Construct
EIVLTQSPATLSLSPGERATLSCRFSQSLVHSNGNTYLHWYQQKPGQAPRLLIYKVSNRFSGIPARFSGSGSGTDFTLTISSLEPEDFAVYYCSQSTRVPPTFGQGTKVEIK

SEQ ID NO: 1169 - protein, 112 aa, synthetic construct
  REGION 1..112: note = Description of Artificial Sequence: Synthetic polypeptide
  REGION 1..112: note = Synthetic Construct
EIVMTQSPATLSVSPGERATLSCRFSQSLVHSNGNTYLHWYQQKPGQAPRLLIYKVSNRFSGIPARFSGSGSGTEFTLTISSLQSEDFAVYYCSQSTRVPPTFGQGTKVEIK

SEQ ID NO: 1170 - protein, 112 aa, synthetic construct
  REGION 1..112: note = Description of Artificial Sequence: Synthetic polypeptide
  REGION 1..112: note = Synthetic Construct
DIQLTQSPSFLSASVGDRVTITCRFSQSLVHSNGNTYLHWYQQKPGKAPKLLIYKVSNRFSGVPSRFSGSGSGTEFTLTISSLQPEDFATYYCSQSTRVPPTFGQGTKVEIK

SEQ ID NO: 1171 - protein, 112 aa, synthetic construct
  REGION 1..112: note = Description of Artificial Sequence: Synthetic polypeptide
  REGION 1..112: note = Synthetic Construct
DIQMTQSPSTLSASVGDRVTITCRFSQSLVHSNGNTYLHWYQQKPGKAPKLLIYKVSNRFSGVPSRFSGSGSGTEFTLTISSLQPDDFATYYCSQSTRVPPTFGQGTKVEIK

SEQ ID NO: 1172 - protein, 112 aa, synthetic construct
  REGION 1..112: note = Description of Artificial Sequence: Synthetic polypeptide
  REGION 1..112: note = Synthetic Construct
DIQMTQSPSSLSASVGDRVTITCRFSQSLVHSNGNTYLHWYQQKPGKAPKLLIYKVSNRFSGVPSRFSGSGSGTDFTLTISSLQPEDFATYYCSQSTRVPPTFGQGTKVEIK

SEQ ID NO: 1173 - protein, 112 aa, synthetic construct
  REGION 1..112: note = Description of Artificial Sequence: Synthetic polypeptide
  REGION 1..112: note = Synthetic Construct
DIQMTQSPSSLSASVGDRVTITCRFSQSLVHSNGNTYLHWYQQKPGKAPKLLIYKVSNRFSGVPSRFSGSGSGTDFTFTISSLQPEDIATYYCSQSTRVPPTFGQGTKVEIK

SEQ ID NO: 1174 - protein, 112 aa, synthetic construct
  REGION 1..112: note = Description of Artificial Sequence: Synthetic polypeptide
  REGION 1..112: note = Synthetic Construct
EIVLTQSPGTLSLSPGERATLSCRFSQSLVHSNGNTYLHWYQQKPGQAPRLLIYKVSNRFSGIPDRFSGSGSGTDFTLTISRLEPEDFAVYYCSQSTRVPPTFGQGTKVEIK

SEQ ID NO: 1175 - protein, 117 aa, synthetic construct
  REGION 1..117: note = Description of Artificial Sequence: Synthetic polypeptide
  REGION 1..117: note = Synthetic Construct
EVQLVESGGGLVQPKGSLKLSCAAFGFNFNTYAMKWVRQTPGKGLEWIARIRSNSNDYATNYSDSVKDRFTISRDDSESIVYVQMNNLKTEDTGMYSCVGHKINNYPFAHWGRGTLV

SEQ ID NO: 1176 - protein, 105 aa, synthetic construct
  REGION 1..105: note = Description of Artificial Sequence: Synthetic polypeptide
  REGION 1..105: note = Synthetic Construct
DIQMTQSPSSLSASVGDRVTITCKASSNVNYMSWYQQKPGKAPKLLIYFTSNLPSGVPSRFSGSGSGTDFTFTISSLQPEDIATYYCSGEVTQFTFGQGTKVEIK

SEQ ID NO: 1177 - protein, 105 aa, synthetic construct
  REGION 1..105: note = Description of Artificial Sequence: Synthetic polypeptide
  REGION 1..105: note = Synthetic Construct
DIQLTQSPSFLSASVGDRVTITCKASSNVNYMSWYQQKPGKAPKLLIYFTSNLPSGVPSRFSGSGSGTEFTLTISSLQPEDFATYYCSGEVTQFTFGQGTKVEIK

SEQ ID NO: 1178 - protein, 105 aa, synthetic construct
  REGION 1..105: note = Description of Artificial Sequence: Synthetic polypeptide
  REGION 1..105: note = Synthetic Construct
DIQMTQSPSSLSASVGDRVTITCKASSNVNYMSWYQQKPGKAPKLLIYFTSNLPSGVPSRFSGSGSGTDFTLTISSLQPEDFATYYCSGEVTQFTFGQGTKVEIK

SEQ ID NO: 1179 - protein, 105 aa, synthetic construct
  REGION 1..105: note = Description of Artificial Sequence: Synthetic polypeptide
  REGION 1..105: note = Synthetic Construct
DIQMTQSPSTLSASVGDRVTITCKASSNVNYMSWYQQKPGKAPKLLIYFTSNLPSGVPSRFSGSGSGTEFTLTISSLQPDDFATYYCSGEVTQFTFGQGTKVEIK

SEQ ID NO: 1180 - protein, 105 aa, synthetic construct
  REGION 1..105: note = Description of Artificial Sequence: Synthetic polypeptide
  REGION 1..105: note = Synthetic Construct
EIVMTQSPATLSVSPGERATLSCKASSNVNYMSWYQQKPGQAPRLLIYFTSNLPSGIPARFSGSGSGTEFTLTISSLQSEDFAVYYCSGEVTQFTFGQGTKVEIK

SEQ ID NO: 1181 - protein, 105 aa, synthetic construct
  REGION 1..105: note = Description of Artificial Sequence: Synthetic polypeptide
  REGION 1..105: note = Synthetic Construct
EIVLTQSPGTLSLSPGERATLSCKASSNVNYMSWYQQKPGQAPRLLIYFTSNLPSGIPDRFSGSGSGTDFTLTISRLEPEDFAVYYCSGEVTQFTFGQGTKVEIK

SEQ ID NO: 1182 - protein, 105 aa, synthetic construct
  REGION 1..105: note = Description of Artificial Sequence: Synthetic polypeptide
  REGION 1..105: note = Synthetic Construct
DIVMTQSPLSLPVTPGEPASISCKASSNVNYMSWYLQKPGQSPQLLIYFTSNLPSGVPDRFSGSGSGTDFTLKISRVEAEDVGVYYCSGEVTQFTFGQGTKVEIK

SEQ ID NO: 1183 - protein, 105 aa, synthetic construct
  REGION 1..105: note = Description of Artificial Sequence: Synthetic polypeptide
  REGION 1..105: note = Synthetic Construct
DVVMTQSPLSLPVTLGQPASISCKASSNVNYMSWFQQRPGQSPRRLIYFTSNLPSGVPDRFSGSGSGTDFTLKISRVEAEDVGVYYCSGEVTQFTFGQGTKVEIK

SEQ ID NO: 1184 - protein, 105 aa, synthetic construct
  REGION 1..105: note = Description of Artificial Sequence: Synthetic polypeptide
  REGION 1..105: note = Synthetic Construct
DIVMTQSPDSLAVSLGERATINCKASSNVNYMSWYQQKPGQPPKLLIYFTSNLPSGVPDRFSGSGSGTDFTLTISSLQAEDVAVYYCSGEVTQFTFGQGTKVEIK

SEQ ID NO: 1185 - protein, 112 aa, synthetic construct
  REGION 1..112: note = Description of Artificial Sequence: Synthetic polypeptide
  REGION 1..112: note = Synthetic Construct
DVVMTQTPLSLPVSLGDQASISCRSSQTIIHSNGNTYLEWYLRKPGQSPKLLIYKVSNRFCGVPDRFSGSGSGTDFTLKISRVEAEDLGVYYCFQGSHVPYTFGGGTELEIK

SEQ ID NO: 1186 - protein, 112 aa, synthetic construct
  REGION 1..112: note = Description of Artificial Sequence: Synthetic polypeptide
  REGION 1..112: note = Synthetic Construct
DVVMTQSPLSLPVTLGQPASISCRSSQTIIHSNGNTYLEWFQQRPGQSPRRLIYKVSNRFCGVPDRFSGSGSGTDFTLKISRVEAEDVGVYYCFQGSHVPYTFGQGTKVEIK

SEQ ID NO: 1187 - protein, 112 aa, synthetic construct
  REGION 1..112: note = Description of Artificial Sequence: Synthetic polypeptide
  REGION 1..112: note = Synthetic Construct
DIVMTQSPLSLPVTPGEPASISCRSSQTIIHSNGNTYLEWYLQKPGQSPQLLIYKVSNRFCGVPDRFSGSGSGTDFTLKISRVEAEDVGVYYCFQGSHVPYTFGQGTKVEIK

SEQ ID NO: 1188 - protein, 112 aa, synthetic construct
  REGION 1..112: note = Description of Artificial Sequence: Synthetic polypeptide
  REGION 1..112: note = Synthetic Construct
DIVMTQSPDSLAVSLGERATINCRSSQTIIHSNGNTYLEWYQQKPGQPPKLLIYKVSNRFCGVPDRFSGSGSGTDFTLTISSLQAEDVAVYYCFQGSHVPYTFGQGTKVEIK

SEQ ID NO: 1189 - protein, 112 aa, synthetic construct
  REGION 1..112: note = Description of Artificial Sequence: Synthetic polypeptide
  REGION 1..112: note = Synthetic Construct
EIVLTQSPATLSLSPGERATLSCRSSQTIIHSNGNTYLEWYQQKPGQAPRLLIYKVSNRFCGIPARFSGSGSGTDFTLTISSLEPEDFAVYYCFQGSHVPYTFGQGTKVEIK

SEQ ID NO: 1190 - protein, 112 aa, synthetic construct
  REGION 1..112: note = Description of Artificial Sequence: Synthetic polypeptide
  REGION 1..112: note = Synthetic Construct
EIVMTQSPATLSVSPGERATLSCRSSQTIIHSNGNTYLEWYQQKPGQAPRLLIYKVSNRFCGIPARFSGSGSGTEFTLTISSLQSEDFAVYYCFQGSHVPYTFGQGTKVEIK

SEQ ID NO: 1191 - protein, 112 aa, synthetic construct
  REGION 1..112: note = Description of Artificial Sequence: Synthetic polypeptide
  REGION 1..112: note = Synthetic Construct
DIQMTQSPSSLSASVGDRVTITCRSSQTIIHSNGNTYLEWYQQKPGKAPKLLIYKVSNRFCGVPSRFSGSGSGTDFTFTISSLQPEDIATYYCFQGSHVPYTFGQGTKVEIK

SEQ ID NO: 1192 - protein, 112 aa, synthetic construct
  REGION 1..112: note = Description of Artificial Sequence: Synthetic polypeptide
  REGION 1..112: note = Synthetic Construct
EIVLTQSPGTLSLSPGERATLSCRSSQTIIHSNGNTYLEWYQQKPGQAPRLLIYKVSNRFCGIPDRFSGSGSGTDFTLTISRLEPEDFAVYYCFQGSHVPYTFGQGTKVEIK

SEQ ID NO: 1193 - protein, 112 aa, synthetic construct
  REGION 1..112: note = Description of Artificial Sequence: Synthetic polypeptide
  REGION 1..112: note = Synthetic Construct
DIQLTQSPSFLSASVGDRVTITCRSSQTIIHSNGNTYLEWYQQKPGKAPKLLIYKVSNRFCGVPSRFSGSGSGTEFTLTISSLQPEDFATYYCFQGSHVPYTFGQGTKVEIK

SEQ ID NO: 1194 - protein, 112 aa, synthetic construct
  REGION 1..112: note = Description of Artificial Sequence: Synthetic polypeptide
  REGION 1..112: note = Synthetic Construct
DIQMTQSPSTLSASVGDRVTITCRSSQTIIHSNGNTYLEWYQQKPGKAPKLLIYKVSNRFCGVPSRFSGSGSGTEFTLTISSLQPDDFATYYCFQGSHVPYTFGQGTKVEIK

SEQ ID NO: 1195 - protein, 112 aa, synthetic construct
  REGION 1..112: note = Description of Artificial Sequence: Synthetic polypeptide
  REGION 1..112: note = Synthetic Construct
DIQMTQSPSSLSASVGDRVTITCRSSQTIIHSNGNTYLEWYQQKPGKAPKLLIYKVSNRFCGVPSRFSGSGSGTDFTLTISSLQPEDFATYYCFQGSHVPYTFGQGTKVEIK

SEQ ID NO: 1196 - protein, 113 aa, synthetic construct
  REGION 1..113: note = Description of Artificial Sequence: Synthetic polypeptide
  REGION 1..113: note = Synthetic Construct
  MOD_RES 3: note = Glutamic acid or Glutamine
  MOD_RES 50: note = Glutamic acid or Glutamine
  MOD_RES 73: note = Any naturally occurring amino acid
DIXMTQSPSSLTVTAGEKVTMSCKSSQSLLNSGNQKKYLTWYQQKPGQPXKLLIYWASTRESGVRDRFTGSGXGTDFTLTISSVQGEDLAIYYCQNDYGFPLTFGGGTKLEMK

SEQ ID NO: 1197 - protein, 113 aa, synthetic construct
  REGION 1..113: note = Description of Artificial Sequence: Synthetic polypeptide
  REGION 1..113: note = Synthetic Construct
DIVMTQSPDSLAVSLGERATINCKSSQSLLNSGNQKKYLTWYQQKPGQPPKLLIYWASTRESGVPDRFSGSGSGTDFTLTISSLQAEDVAVYYCQNDYGFPLTFGQGTKVEIK

SEQ ID NO: 1198 - protein, 113 aa, synthetic construct
  REGION 1..113: note = Description of Artificial Sequence: Synthetic polypeptide
  REGION 1..113: note = Synthetic Construct
DVVMTQSPLSLPVTLGQPASISCKSSQSLLNSGNQKKYLTWFQQRPGQSPRRLIYWASTRESGVPDRFSGSGSGTDFTLKISRVEAEDVGVYYCQNDYGFPLTFGQGTKVEIK

SEQ ID NO: 1199 - protein, 113 aa, synthetic construct
  REGION 1..113: note = Description of Artificial Sequence: Synthetic polypeptide
  REGION 1..113: note = Synthetic Construct
DIVMTQSPLSLPVTPGEPASISCKSSQSLLNSGNQKKYLTWYLQKPGQSPQLLIYWASTRESGVPDRFSGSGSGTDFTLKISRVEAEDVGVYYCQNDYGFPLTFGQGTKVEIK

SEQ ID NO: 1200 - protein, 113 aa, synthetic construct
  REGION 1..113: note = Description of Artificial Sequence: Synthetic polypeptide
  REGION 1..113: note = Synthetic Construct
DIQMTQSPSSLSASVGDRVTITCKSSQSLLNSGNQKKYLTWYQQKPGKAPKLLIYWASTRESGVPSRFSGSGSGTDFTFTISSLQPEDIATYYCQNDYGFPLTFGQGTKVEIK

SEQ ID NO: 1201 - protein, 113 aa, synthetic construct
  REGION 1..113: note = Description of Artificial Sequence: Synthetic polypeptide
  REGION 1..113: note = Synthetic Construct
EIVLTQSPATLSLSPGERATLSCKSSQSLLNSGNQKKYLTWYQQKPGQAPRLLIYWASTRESGIPARFSGSGSGTDFTLTISSLEPEDFAVYYCQNDYGFPLTFGQGTKVEIK

SEQ ID NO: 1202 - protein, 113 aa, synthetic construct
  REGION 1..113: note = Description of Artificial Sequence: Synthetic polypeptide
  REGION 1..113: note = Synthetic Construct
EIVMTQSPATLSVSPGERATLSCKSSQSLLNSGNQKKYLTWYQQKPGQAPRLLIYWASTRESGIPARFSGSGSGTEFTLTISSLQSEDFAVYYCQNDYGFPLTFGQGTKVEIK

SEQ ID NO: 1203 - protein, 113 aa, synthetic construct
  REGION 1..113: note = Description of Artificial Sequence: Synthetic polypeptide
  REGION 1..113: note = Synthetic Construct
DIQMTQSPSTLSASVGDRVTITCKSSQSLLNSGNQKKYLTWYQQKPGKAPKLLIYWASTRESGVPSRFSGSGSGTEFTLTISSLQPDDFATYYCQNDYGFPLTFGQGTKVEIK

SEQ ID NO: 1204 - protein, 113 aa, synthetic construct
  REGION 1..113: note = Description of Artificial Sequence: Synthetic polypeptide
  REGION 1..113: note = Synthetic Construct
EIVLTQSPGTLSLSPGERATLSCKSSQSLLNSGNQKKYLTWYQQKPGQAPRLLIYWASTRESGIPDRFSGSGSGTDFTLTISRLEPEDFAVYYCQNDYGFPLTFGQGTKVEIK

SEQ ID NO: 1205 - protein, 113 aa, synthetic construct
  REGION 1..113: note = Description of Artificial Sequence: Synthetic polypeptide
  REGION 1..113: note = Synthetic Construct
DIQLTQSPSFLSASVGDRVTITCKSSQSLLNSGNQKKYLTWYQQKPGKAPKLLIYWASTRESGVPSRFSGSGSGTEFTLTISSLQPEDFATYYCQNDYGFPLTFGQGTKVEIK

SEQ ID NO: 1206 - protein, 113 aa, synthetic construct
  REGION 1..113: note = Description of Artificial Sequence: Synthetic polypeptide
  REGION 1..113: note = Synthetic Construct
DIQMTQSPSSLSASVGDRVTITCKSSQSLLNSGNQKKYLTWYQQKPGKAPKLLIYWASTRESGVPSRFSGSGSGTDFTLTISSLQPEDFATYYCQNDYGFPLTFGQGTKVEIK

SEQ ID NO: 1207 - protein, 109 aa, synthetic construct
  REGION 1..109: note = Description of Artificial Sequence: Synthetic polypeptide
  REGION 1..109: note = Synthetic Construct
TQSPSSLAVSVGEKVTMTCKSSQSLLYSGNQKNFLAWYQQKPGQSPKLLIYWASTRESGVPDRFTGSGSGTDFTLTISTVKAEDLAVYYCQQYYSYPFTFGSGTKLEIK

SEQ ID NO: 1208 - protein, 113 aa, synthetic construct
  REGION 1..113: note = Description of Artificial Sequence: Synthetic polypeptide
  REGION 1..113: note = Synthetic Construct
DIVMTQSPDSLAVSLGERATINCKSSQSLLYSGNQKNFLAWYQQKPGQPPKLLIYWASTRESGVPDRFSGSGSGTDFTLTISSLQAEDVAVYYCQQYYSYPFTFGQGTKVEIK

SEQ ID NO: 1209 - protein, 113 aa, synthetic construct
  REGION 1..113: note = Description of Artificial Sequence: Synthetic polypeptide
  REGION 1..113: note = Synthetic Construct
DIVMTQSPLSLPVTPGEPASISCKSSQSLLYSGNQKNFLAWYLQKPGQSPQLLIYWASTRESGVPDRFSGSGSGTDFTLKISRVEAEDVGVYYCQQYYSYPFTFGQGTKVEIK

SEQ ID NO: 1210 - protein, 113 aa, synthetic construct
  REGION 1..113: note = Description of Artificial Sequence: Synthetic polypeptide
  REGION 1..113: note = Synthetic Construct
DVVMTQSPLSLPVTLGQPASISCKSSQSLLYSGNQKNFLAWFQQRPGQSPRRLIYWASTRESGVPDRFSGSGSGTDFTLKISRVEAEDVGVYYCQQYYSYPFTFGQGTKVEIK

SEQ ID NO: 1211 - protein, 113 aa, synthetic construct
  REGION 1..113: note = Description of Artificial Sequence: Synthetic polypeptide
  REGION 1..113: note = Synthetic Construct
DIQLTQSPSFLSASVGDRVTITCKSSQSLLYSGNQKNFLAWYQQKPGKAPKLLIYWASTRESGVPSRFSGSGSGTEFTLTISSLQPEDFATYYCQQYYSYPFTFGQGTKVEIK

SEQ ID NO: 1212 - protein, 113 aa, synthetic construct
  REGION 1..113: note = Description of Artificial Sequence: Synthetic polypeptide
  REGION 1..113: note = Synthetic Construct
DIQMTQSPSTLSASVGDRVTITCKSSQSLLYSGNQKNFLAWYQQKPGKAPKLLIYWASTRESGVPSRFSGSGSGTEFTLTISSLQPDDFATYYCQQYYSYPFTFGQGTKVEIK

SEQ ID NO: 1213 - protein, 113 aa, synthetic construct
  REGION 1..113: note = Description of Artificial Sequence: Synthetic polypeptide
  REGION 1..113: note = Synthetic Construct
EIVMTQSPATLSVSPGERATLSCKSSQSLLYSGNQKNFLAWYQQKPGQAPRLLIYWASTRESGIPARFSGSGSGTEFTLTISSLQSEDFAVYYCQQYYSYPFTFGQGTKVEIK

SEQ ID NO: 1214 - protein, 113 aa, synthetic construct
  REGION 1..113: note = Description of Artificial Sequence: Synthetic polypeptide
  REGION 1..113: note = Synthetic Construct
DIQMTQSPSSLSASVGDRVTITCKSSQSLLYSGNQKNFLAWYQQKPGKAPKLLIYWASTRESGVPSRFSGSGSGTDFTFTISSLQPEDIATYYCQQYYSYPFTFGQGTKVEIK

SEQ ID NO: 1215 - protein, 113 aa, synthetic construct
  REGION 1..113: note = Description of Artificial Sequence: Synthetic polypeptide
  REGION 1..113: note = Synthetic Construct
EIVLTQSPATLSLSPGERATLSCKSSQSLLYSGNQKNFLAWYQQKPGQAPRLLIYWASTRESGIPARFSGSGSGTDFTLTISSLEPEDFAVYYCQQYYSYPFTFGQGTKVEIK

SEQ ID NO: 1216 - protein, 113 aa, synthetic construct
  REGION 1..113: note = Description of Artificial Sequence: Synthetic polypeptide
  REGION 1..113: note = Synthetic Construct
DIQMTQSPSSLSASVGDRVTITCKSSQSLLYSGNQKNFLAWYQQKPGKAPKLLIYWASTRESGVPSRFSGSGSGTDFTLTISSLQPEDFATYYCQQYYSYPFTFGQGTKVEIK

SEQ ID NO: 1217 - protein, 113 aa, synthetic construct
  REGION 1..113: note = Description of Artificial Sequence: Synthetic polypeptide
  REGION 1..113: note = Synthetic Construct
EIVLTQSPGTLSLSPGERATLSCKSSQSLLYSGNQKNFLAWYQQKPGQAPRLLIYWASTRESGIPDRFSGSGSGTDFTLTISRLEPEDFAVYYCQQYYSYPFTFGQGTKVEIK

SEQ ID NO: 1218 - protein, 111 aa, synthetic construct
  REGION 1..111: note = Description of Artificial Sequence: Synthetic polypeptide
  REGION 1..111: note = Synthetic Construct
TMSQSPSSLAVSVGEKVTMSCKSSQSLLYSSDQKNYLAWYQQKPGQSPKLLIYWASTRESGVPDRFTGSGSGTDFTLTISSVKAEDLAVYCCQQYYSYPLTFGAGTKLELK

SEQ ID NO: 1219 - protein, 119 aa, synthetic construct
  REGION 1..119: note = Description of Artificial Sequence: Synthetic polypeptide
  REGION 1..119: note = Synthetic Construct
EVKLVESGGGLVKPGGSLKLSCAASGFTLSSYAMSWVRQTPEKRLEWVASISRGGSTYYPDSVQGRFTFSRDNARNILYLQMSSLRSEDTAMYYCTRGYGYYRTPFANWGQGTLVTVSA

SEQ ID NO: 1220 - protein, 119 aa, synthetic construct
  REGION 1..119: note = Description of Artificial Sequence: Synthetic polypeptide
  REGION 1..119: note = Synthetic Construct
QVQLQESGPGLVKPSETLSLTCTVSGFTLSSYAMSWIRQPPGKGLEWVASISRGGSTYYPPSLKSRVTISVDTSKNQFSLKLSSVTAADTAVYYCTRGYGYYRTPFANWGQGTLVTVSS

SEQ ID NO: 1221 - protein, 119 aa, synthetic construct
  REGION 1..119: note = Description of Artificial Sequence: Synthetic polypeptide
  REGION 1..119: note = Synthetic Construct
EVQLLESGGGLVQPGGSLRLSCAASGFTLSSYAMSWVRQAPGKGLEWVASISRGGSTYYPDSVKGRFTISRDNSKNTLYLQMNSLRAEDTAVYYCTRGYGYYRTPFANWGQGTLVTVSS

SEQ ID NO: 1222 - protein, 119 aa, synthetic construct
  REGION 1..119: note = Description of Artificial Sequence: Synthetic polypeptide
  REGION 1..119: note = Synthetic Construct
EVQLVESGGGLVQPGGSLRLSCAASGFTLSSYAMSWVRQAPGKGLEWVASISRGGSTYYPDSVKGRFTISRDNAKNSLYLQMNSLRAEDTAVYYCTRGYGYYRTPFANWGQGTLVTVSS

SEQ ID NO: 1223 - protein, 119 aa, synthetic construct
  REGION 1..119: note = Description of Artificial Sequence: Synthetic polypeptide
  REGION 1..119: note = Synthetic Construct
QVQLVESGGGVVQPGRSLRLSCAASGFTLSSYAMSWVRQAPGKGLEWVASISRGGSTYYPDSVKGRFTISRDNSKNTLYLQMNSLRAEDTAVYYCTRGYGYYRTPFANWGQGTLVTVSS

SEQ ID NO: 1224 - protein, 119 aa, synthetic construct
  REGION 1..119: note = Description of Artificial Sequence: Synthetic polypeptide
  REGION 1..119: note = Synthetic Construct
QVQLVQSGAEVKKPGSSVKVSCKASGFTLSSYAMSWVRQAPGQGLEWVASISRGGSTYYPQKFQGRVTITADESTSTAYMELSSLRSEDTAVYYCTRGYGYYRTPFANWGQGTLVTVSS

SEQ ID NO: 1225 - protein, 119 aa, synthetic construct
  REGION 1..119: note = Description of Artificial Sequence: Synthetic polypeptide
  REGION 1..119: note = Synthetic Construct
QVQLVQSGAEVKKPGASVKVSCKASGFTLSSYAMSWVRQAPGQGLEWVASISRGGSTYYPQKFQGRVTMTRDTSTSTVYMELSSLRSEDTAVYYCTRGYGYYRTPFANWGQGTLVTVSS

SEQ ID NO: 1226 - protein, 119 aa, synthetic construct
  REGION 1..119: note = Description of Artificial Sequence: Synthetic polypeptide
  REGION 1..119: note = Synthetic Construct
EVQLVQSGAEVKKPGESLKISCKGSGFTLSSYAMSWVRQMPGKGLEWVASISRGGSTYYPPSFQGQVTISADKSISTAYLQWSSLKASDTAMYYCTRGYGYYRTPFANWGQGTLVTVSS

SEQ ID NO: 1227 - protein, 119 aa, synthetic construct
  REGION 1..119: note = Description of Artificial Sequence: Synthetic polypeptide
  REGION 1..119: note = Synthetic Construct
QLQLQESGPGLVKPSETLSLTCTVSGFTLSSYAMSWIRQPPGKGLEWVASISRGGSTYYPPSLKSRVTISVDTSKNQFSLKLSSVTAADTAVYYCTRGYGYYRTPFANWGQGTLVTVSS

SEQ ID NO: 1228 - protein, 119 aa, synthetic construct
  REGION 1..119: note = Description of Artificial Sequence: Synthetic polypeptide
  REGION 1..119: note = Synthetic Construct
QVQLQESGPGLVKPSQTLSLTCTVSGFTLSSYAMSWIRQPPGKGLEWVASISRGGSTYYPPSLKSRVTISVDTSKNQFSLKLSSVTAADTAVYYCTRGYGYYRTPFANWGQGTLVTVSS

SEQ ID NO: 1229 - protein, 119 aa, synthetic construct
  REGION 1..119: note = Description of Artificial Sequence: Synthetic polypeptide
  REGION 1..119: note = Synthetic Construct
EVQLQQSGPELVKPGTSVKISCKTSGYTFTEYTMHWVKQSHGKSLEWIGGINPNNGGTSYSQKFKGKASLTVDKSSSTAYMELHSLASDDSAVYYCARGGSHYYAMDYWGQGTSVTVSS

SEQ ID NO: 1230 - protein, 119 aa, synthetic construct
  REGION 1..119: note = Description of Artificial Sequence: Synthetic polypeptide
  REGION 1..119: note = Synthetic Construct
QVQLVQSGAEVKKPGASVKVSCKASGYTFTEYTMHWVRQAPGQGLEWIGGINPNNGGTSYSQKFQGRVTMTRDTSTSTVYMELSSLRSEDTAVYYCARGGSHYYAMDYWGQGTLVTVSS

SEQ ID NO: 1231 - protein, 119 aa, synthetic construct
  REGION 1..119: note = Description of Artificial Sequence: Synthetic polypeptide
  REGION 1..119: note = Synthetic Construct
EVQLVQSGAEVKKPGESLKISCKGSGYTFTEYTMHWVRQMPGKGLEWIGGINPNNGGTSYSPSFQGQVTISADKSISTAYLQWSSLKASDTAMYYCARGGSHYYAMDYWGQGTLVTVSS

SEQ ID NO: 1232 - protein, 119 aa, synthetic construct
  REGION 1..119: note = Description of Artificial Sequence: Synthetic polypeptide
  REGION 1..119: note = Synthetic Construct
QVQLVQSGAEVKKPGSSVKVSCKASGYTFTEYTMHWVRQAPGQGLEWIGGINPNNGGTSYSQKFQGRVTITADESTSTAYMELSSLRSEDTAVYYCARGGSHYYAMDYWGQGTLVTVSS

SEQ ID NO: 1233 - protein, 119 aa, synthetic construct
  REGION 1..119: note = Description of Artificial Sequence: Synthetic polypeptide
  REGION 1..119: note = Synthetic Construct
EVQLLESGGGLVQPGGSLRLSCAASGYTFTEYTMHWVRQAPGKGLEWIGGINPNNGGTSYSDSVKGRFTISRDNSKNTLYLQMNSLRAEDTAVYYCARGGSHYYAMDYWGQGTLVTVSS

SEQ ID NO: 1234 - protein, 119 aa, synthetic construct
  REGION 1..119: note = Description of Artificial Sequence: Synthetic polypeptide
  REGION 1..119: note = Synthetic Construct
QVQLVESGGGVVQPGRSLRLSCAASGYTFTEYTMHWVRQAPGKGLEWIGGINPNNGGTSYSDSVKGRFTISRDNSKNTLYLQMNSLRAEDTAVYYCARGGSHYYAMDYWGQGTLVTVSS

SEQ ID NO: 1235 - protein, 119 aa, synthetic construct
  REGION 1..119: note = Description of Artificial Sequence: Synthetic polypeptide
  REGION 1..119: note = Synthetic Construct
EVQLVESGGGLVQPGGSLRLSCAASGYTFTEYTMHWVRQAPGKGLEWIGGINPNNGGTSYSDSVKGRFTISRDNAKNSLYLQMNSLRAEDTAVYYCARGGSHYYAMDYWGQGTLVTVSS

SEQ ID NO: 1236 - protein, 119 aa, synthetic construct
  REGION 1..119: note = Description of Artificial Sequence: Synthetic polypeptide
  REGION 1..119: note = Synthetic Construct
QVQLQESGPGLVKPSETLSLTCTVSGYTFTEYTMHWIRQPPGKGLEWIGGINPNNGGTSYSPSLKSRVTISVDTSKNQFSLKLSSVTAADTAVYYCARGGSHYYAMDYWGQGTLVTVSS

SEQ ID NO: 1237 - protein, 119 aa, synthetic construct
  REGION 1..119: note = Description of Artificial Sequence: Synthetic polypeptide
  REGION 1..119: note = Synthetic Construct
EVQLVESGGGLVKPGGSLRLSCAASGYTFTEYTMHWVRQAPGKGLEWIGGINPNNGGTSYSAPVKGRFTISRDDSKNTLYLQMNSLKTEDTAVYYCARGGSHYYAMDYWGQGTLVTVSS

SEQ ID NO: 1238 - protein, 119 aa, synthetic construct
  REGION 1..119: note = Description of Artificial Sequence: Synthetic polypeptide
  REGION 1..119: note = Synthetic Construct
QLQLQESGPGLVKPSETLSLTCTVSGYTFTEYTMHWIRQPPGKGLEWIGGINPNNGGTSYSPSLKSRVTISVDTSKNQFSLKLSSVTAADTAVYYCARGGSHYYAMDYWGQGTLVTVSS

SEQ ID NO: 1239 - protein, 125 aa, synthetic construct
  REGION 1..125: note = Description of Artificial Sequence: Synthetic polypeptide
  REGION 1..125: note = Synthetic Construct
QVQLQQSGAELVRPGASVTLSCKASGYTFTDYEMHWVKQTPVHGLEWIGVIDPETGGTAYNQKFKGKAILTADKSSSTAYMELRSLTSEDSAVYYCTSPDYYGSSYPLYYAMDYWGQGTSVTVSS

SEQ ID NO: 1240 - protein, 125 aa, synthetic construct
  REGION 1..125: note = Description of Artificial Sequence: Synthetic polypeptide
  REGION 1..125: note = Synthetic Construct
QVQLVQSGAEVKKPGASVKVSCKASGYTFTDYEMHWVRQAPGQGLEWIGVIDPETGGTAYNQKFQGRVTMTRDTSTSTVYMELSSLRSEDTAVYYCTSPDYYGSSYPLYYAMDYWGQGTLVTVSS

SEQ ID NO: 1241 - protein, 125 aa, synthetic construct
  REGION 1..125: note = Description of Artificial Sequence: Synthetic polypeptide
  REGION 1..125: note = Synthetic Construct
EVQLVQSGAEVKKPGESLKISCKGSGYTFTDYEMHWVRQMPGKGLEWIGVIDPETGGTAYNPSFQGQVTISADKSISTAYLQWSSLKASDTAMYYCTSPDYYGSSYPLYYAMDYWGQGTLVTVSS

SEQ ID NO: 1242 - protein, 125 aa, synthetic construct
  REGION 1..125: note = Description of Artificial Sequence: Synthetic polypeptide
  REGION 1..125: note = Synthetic Construct
QVQLVESGGGVVQPGRSLRLSCAASGYTFTDYEMHWVRQAPGKGLEWIGVIDPETGGTAYNDSVKGRFTISRDNSKNTLYLQMNSLRAEDTAVYYCTSPDYYGSSYPLYYAMDYWGQGTLVTVSS

SEQ ID NO: 1243 - protein, 125 aa, synthetic construct
  REGION 1..125: note = Description of Artificial Sequence: Synthetic polypeptide
  REGION 1..125: note = Synthetic Construct
EVQLLESGGGLVQPGGSLRLSCAASGYTFTDYEMHWVRQAPGKGLEWIGVIDPETGGTAYNDSVKGRFTISRDNSKNTLYLQMNSLRAEDTAVYYCTSPDYYGSSYPLYYAMDYWGQGTLVTVSS

SEQ ID NO: 1244 - protein, 125 aa, synthetic construct
  REGION 1..125: note = Description of Artificial Sequence: Synthetic polypeptide
  REGION 1..125: note = Synthetic Construct
QVQLVQSGAEVKKPGSSVKVSCKASGYTFTDYEMHWVRQAPGQGLEWIGVIDPETGGTAYNQKFQGRVTITADESTSTAYMELSSLRSEDTAVYYCTSPDYYGSSYPLYYAMDYWGQGTLVTVSS

SEQ ID NO: 1245 - protein, 125 aa, synthetic construct
  REGION 1..125: note = Description of Artificial Sequence: Synthetic polypeptide
  REGION 1..125: note = Synthetic Construct
EVQLVESGGGLVQPGGSLRLSCAASGYTFTDYEMHWVRQAPGKGLEWIGVIDPETGGTAYNDSVKGRFTISRDNAKNSLYLQMNSLRAEDTAVYYCTSPDYYGSSYPLYYAMDYWGQGTLVTVSS

SEQ ID NO: 1246 - protein, 125 aa, synthetic construct
  REGION 1..125: note = Description of Artificial Sequence: Synthetic polypeptide
  REGION 1..125: note = Synthetic Construct
QVQLQESGPGLVKPSETLSLTCTVSGYTFTDYEMHWIRQPPGKGLEWIGVIDPETGGTAYNPSLKSRVTISVDTSKNQFSLKLSSVTAADTAVYYCTSPDYYGSSYPLYYAMDYWGQGTLVTVSS

SEQ ID NO: 1247 - protein, 125 aa, synthetic construct
  REGION 1..125: note = Description of Artificial Sequence: Synthetic polypeptide
  REGION 1..125: note = Synthetic Construct
EVQLVESGGGLVKPGGSLRLSCAASGYTFTDYEMHWVRQAPGKGLEWIGVIDPETGGTAYNAPVKGRFTISRDDSKNTLYLQMNSLKTEDTAVYYCTSPDYYGSSYPLYYAMDYWGQGTLVTVSS

SEQ ID NO: 1248 - protein, 125 aa, synthetic construct
  REGION 1..125: note = Description of Artificial Sequence: Synthetic polypeptide
  REGION 1..125: note = Synthetic Construct
QLQLQESGPGLVKPSETLSLTCTVSGYTFTDYEMHWIRQPPGKGLEWIGVIDPETGGTAYNPSLKSRVTISVDTSKNQFSLKLSSVTAADTAVYYCTSPDYYGSSYPLYYAMDYWGQGTLVTVSS

SEQ ID NO: 1249 - protein, 116 aa, synthetic construct
  REGION 1..116: note = Description of Artificial Sequence: Synthetic polypeptide
  REGION 1..116: note = Synthetic Construct
EVKLEESGGGLVQPGGSMKLSCAASGFTFSDAWMGWVRQSPEKGLEWVAEIRDKVKNHATYYAESVKGRFTISRDDSKSTVYLQMNTLRADDTGIYYCRLGVFDYWGQGTTLTVSS

SEQ ID NO: 1250 - protein, 116 aa, synthetic construct
  REGION 1..116: note = Description of Artificial Sequence: Synthetic polypeptide
  REGION 1..116: note = Synthetic Construct
EVQLVESGGGLVKPGGSLRLSCAASGFTFSDAWMGWVRQAPGKGLEWVAEIRDKVKNHATYYAAPVKGRFTISRDDSKNTLYLQMNSLKTEDTAVYYCRLGVFDYWGQGTLVTVSS

SEQ ID NO: 1251 - protein, 116 aa, synthetic construct
  REGION 1..116: note = Description of Artificial Sequence: Synthetic polypeptide
  REGION 1..116: note = Synthetic Construct
EVQLVESGGGLVQPGGSLRLSCAASGFTFSDAWMGWVRQAPGKGLEWVAEIRDKVKNHATYYADSVKGRFTISRDNAKNSLYLQMNSLRAEDTAVYYCRLGVFDYWGQGTLVTVSS

SEQ ID NO: 1252 - protein, 116 aa, synthetic construct
  REGION 1..116: note = Description of Artificial Sequence: Synthetic polypeptide
  REGION 1..116: note = Synthetic Construct
EVQLLESGGGLVQPGGSLRLSCAASGFTFSDAWMGWVRQAPGKGLEWVAEIRDKVKNHATYYADSVKGRFTISRDNSKNTLYLQMNSLRAEDTAVYYCRLGVFDYWGQGTLVTVSS

SEQ ID NO: 1253 - protein, 116 aa, synthetic construct
  REGION 1..116: note = Description of Artificial Sequence: Synthetic polypeptide
  REGION 1..116: note = Synthetic Construct
QVQLVESGGGVVQPGRSLRLSCAASGFTFSDAWMGWVRQAPGKGLEWVAEIRDKVKNHATYYADSVKGRFTISRDNSKNTLYLQMNSLRAEDTAVYYCRLGVFDYWGQGTLVTVSS

SEQ ID NO: 1254 - protein, 116 aa, synthetic construct
  REGION 1..116: note = Description of Artificial Sequence: Synthetic polypeptide
  REGION 1..116: note = Synthetic Construct
QVQLVQSGAEVKKPGSSVKVSCKASGFTFSDAWMGWVRQAPGQGLEWVAEIRDKVKNHATYYAQKFQGRVTITADESTSTAYMELSSLRSEDTAVYYCRLGVFDYWGQGTLVTVSS

SEQ ID NO: 1255 - protein, 116 aa, synthetic construct
  REGION 1..116: note = Description of Artificial Sequence: Synthetic polypeptide
  REGION 1..116: note = Synthetic Construct
QVQLVQSGAEVKKPGASVKVSCKASGFTFSDAWMGWVRQAPGQGLEWVAEIRDKVKNHATYYAQKFQGRVTMTRDTSTSTVYMELSSLRSEDTAVYYCRLGVFDYWGQGTLVTVSS

SEQ ID NO: 1256 - protein, 116 aa, synthetic construct
  REGION 1..116: note = Description of Artificial Sequence: Synthetic polypeptide
  REGION 1..116: note = Synthetic Construct
EVQLVQSGAEVKKPGESLKISCKGSGFTFSDAWMGWVRQMPGKGLEWVAEIRDKVKNHATYYAPSFQGQVTISADKSISTAYLQWSSLKASDTAMYYCRLGVFDYWGQGTLVTVSS

SEQ ID NO: 1257 - protein, 116 aa, synthetic construct
  REGION 1..116: note = Description of Artificial Sequence: Synthetic polypeptide
  REGION 1..116: note = Synthetic Construct
QVQLQESGPGLVKPSETLSLTCTVSGFTFSDAWMGWIRQPPGKGLEWVAEIRDKVKNHATYYAPSLKSRVTISVDTSKNQFSLKLSSVTAADTAVYYCRLGVFDYWGQGTLVTVSS

SEQ ID NO: 1258 - protein, 116 aa, synthetic construct
  REGION 1..116: note = Description of Artificial Sequence: Synthetic polypeptide
  REGION 1..116: note = Synthetic Construct
QLQLQESGPGLVKPSETLSLTCTVSGFTFSDAWMGWIRQPPGKGLEWVAEIRDKVKNHATYYAPSLKSRVTISVDTSKNQFSLKLSSVTAADTAVYYCRLGVFDYWGQGTLVTVSS

SEQ ID NO: 1259 - protein, 122 aa, synthetic construct
  REGION 1..122: note = Description of Artificial Sequence: Synthetic polypeptide
  REGION 1..122: note = Synthetic Construct
EVQLVESGGGLVQPKGSLKLSCAASGFSFNTYAMNWVRQAPGKGLEWIARIRSKSNNYATYYADSVKDRITCSRDDSENMFYLQLSSLKTEDTAMYYCVRHGDGNLWYIDVWGTGTTVTVST

SEQ ID NO: 1260 - protein, 122 aa, synthetic construct
  REGION 1..122: note = Description of Artificial Sequence: Synthetic polypeptide
  REGION 1..122: note = Synthetic Construct
EVQLVESGGGLVKPGGSLRLSCAASGFSFNTYAMNWVRQAPGKGLEWIARIRSKSNNYATYYAAPVKGRFTISRDDSKNTLYLQMNSLKTEDTAVYYCVRHGDGNLWYIDVWGQGTLVTVSS

SEQ ID NO: 1261 - protein, 122 aa, synthetic construct
  REGION 1..122: note = Description of Artificial Sequence: Synthetic polypeptide
  REGION 1..122: note = Synthetic Construct
EVQLVESGGGLVQPGGSLRLSCAASGFSFNTYAMNWVRQAPGKGLEWIARIRSKSNNYATYYADSVKGRFTISRDNAKNSLYLQMNSLRAEDTAVYYCVRHGDGNLWYIDVWGQGTLVTVSS

SEQ ID NO: 1262 - protein, 122 aa, synthetic construct
  REGION 1..122: note = Description of Artificial Sequence: Synthetic polypeptide
  REGION 1..122: note = Synthetic Construct
EVQLLESGGGLVQPGGSLRLSCAASGFSFNTYAMNWVRQAPGKGLEWIARIRSKSNNYATYYADSVKGRFTISRDNSKNTLYLQMNSLRAEDTAVYYCVRHGDGNLWYIDVWGQGTLVTVSS

SEQ ID NO: 1263 - protein, 122 aa, synthetic construct
  REGION 1..122: note = Description of Artificial Sequence: Synthetic polypeptide
  REGION 1..122: note = Synthetic Construct
QVQLVESGGGVVQPGRSLRLSCAASGFSFNTYAMNWVRQAPGKGLEWIARIRSKSNNYATYYADSVKGRFTISRDNSKNTLYLQMNSLRAEDTAVYYCVRHGDGNLWYIDVWGQGTLVTVSS

SEQ ID NO: 1264 - protein, 122 aa, synthetic construct
  REGION 1..122: note = Description of Artificial Sequence: Synthetic polypeptide
  REGION 1..122: note = Synthetic Construct
QVQLVQSGAEVKKPGSSVKVSCKASGFSFNTYAMNWVRQAPGQGLEWIARIRSKSNNYATYYAQKFQGRVTITADESTSTAYMELSSLRSEDTAVYYCVRHGDGNLWYIDVWGQGTLVTVSS

SEQ ID NO: 1265 - protein, 122 aa, synthetic construct
  REGION 1..122: note = Description of Artificial Sequence: Synthetic polypeptide
  REGION 1..122: note = Synthetic Construct
EVQLVQSGAEVKKPGESLKISCKGSGFSFNTYAMNWVRQMPGKGLEWIARIRSKSNNYATYYAPSFQGQVTISADKSISTAYLQWSSLKASDTAMYYCVRHGDGNLWYIDVWGQGTLVTVSS

SEQ ID NO: 1266 - protein, 122 aa, synthetic construct
  REGION 1..122: note = Description of Artificial Sequence: Synthetic polypeptide
  REGION 1..122: note = Synthetic Construct
QVQLVQSGAEVKKPGASVKVSCKASGFSFNTYAMNWVRQAPGQGLEWIARIRSKSNNYATYYAQKFQGRVTMTRDTSTSTVYMELSSLRSEDTAVYYCVRHGDGNLWYIDVWGQGTLVTVSS

SEQ ID NO: 1267 - protein, 122 aa, synthetic construct
  REGION 1..122: note = Description of Artificial Sequence: Synthetic polypeptide
  REGION 1..122: note = Synthetic Construct
QVQLQESGPGLVKPSETLSLTCTVSGFSFNTYAMNWIRQPPGKGLEWIARIRSKSNNYATYYAPSLKSRVTISVDTSKNQFSLKLSSVTAADTAVYYCVRHGDGNLWYIDVWGQGTLVTVSS

SEQ ID NO: 1268 - protein, 122 aa, synthetic construct
  REGION 1..122: note = Description of Artificial Sequence: Synthetic polypeptide
  REGION 1..122: note = Synthetic Construct
QVQLQESGPGLVKPSQTLSLTCTVSGFSFNTYAMNWIRQPPGKGLEWIARIRSKSNNYATYYAPSLKSRVTISVDTSKNQFSLKLSSVTAADTAVYYCVRHGDGNLWYIDVWGQGTLVTVSS

SEQ ID NO: 1269 - protein, 116 aa, synthetic construct
  REGION 1..116: note = Description of Artificial Sequence: Synthetic polypeptide
  REGION 1..116: note = Synthetic Construct
QVQLQQSGAELVKPGASVKLSCKASGYTVSRYWMHWVKQRPGRGLEWIGRIDPNSGGTKYNEKFKTKATLTVDKPSSTAYMQVSSLTSEDSAVYYCVLTGTDFDYWGQGTTLTVSS

SEQ ID NO: 1270 - protein, 116 aa, synthetic construct
  REGION 1..116: note = Description of Artificial Sequence: Synthetic polypeptide
  REGION 1..116: note = Synthetic Construct
QVQLVQSGAEVKKPGASVKVSCKASGYTVSRYWMHWVRQAPGQGLEWIGRIDPNSGGTKYNQKFQGRVTMTRDTSTSTVYMELSSLRSEDTAVYYCVLTGTDFDYWGQGTLVTVSS

SEQ ID NO: 1271 - protein, 116 aa, synthetic construct
  REGION 1..116: note = Description of Artificial Sequence: Synthetic polypeptide
  REGION 1..116: note = Synthetic Construct
EVQLLESGGGLVQPGGSLRLSCAASGYTVSRYWMHWVRQAPGKGLEWIGRIDPNSGGTKYNDSVKGRFTISRDNSKNTLYLQMNSLRAEDTAVYYCVLTGTDFDYWGQGTLVTVSS

SEQ ID NO: 1272 - protein, 116 aa, synthetic construct
  REGION 1..116: note = Description of Artificial Sequence: Synthetic polypeptide
  REGION 1..116: note = Synthetic Construct
QVQLVQSGAEVKKPGSSVKVSCKASGYTVSRYWMHWVRQAPGQGLEWIGRIDPNSGGTKYNQKFQGRVTITADESTSTAYMELSSLRSEDTAVYYCVLTGTDFDYWGQGTLVTVSS

SEQ ID NO: 1273 - protein, 116 aa, synthetic construct
  REGION 1..116: note = Description of Artificial Sequence: Synthetic polypeptide
  REGION 1..116: note = Synthetic Construct
EVQLVQSGAEVKKPGESLKISCKGSGYTVSRYWMHWVRQMPGKGLEWIGRIDPNSGGTKYNPSFQGQVTISADKSISTAYLQWSSLKASDTAMYYCVLTGTDFDYWGQGTLVTVSS

SEQ ID NO: 1274 - protein, 116 aa, synthetic construct
  REGION 1..116: note = Description of Artificial Sequence: Synthetic polypeptide
  REGION 1..116: note = Synthetic Construct
EVQLVESGGGLVQPGGSLRLSCAASGYTVSRYWMHWVRQAPGKGLEWIGRIDPNSGGTKYNDSVKGRFTISRDNAKNSLYLQMNSLRAEDTAVYYCVLTGTDFDYWGQGTLVTVSS

SEQ ID NO: 1275 - protein, 116 aa, synthetic construct
  REGION 1..116: note = Description of Artificial Sequence: Synthetic polypeptide
  REGION 1..116: note = Synthetic Construct
QVQLVESGGGVVQPGRSLRLSCAASGYTVSRYWMHWVRQAPGKGLEWIGRIDPNSGGTKYNDSVKGRFTISRDNSKNTLYLQMNSLRAEDTAVYYCVLTGTDFDYWGQGTLVTVSS

SEQ ID NO: 1276 - protein, 116 aa, synthetic construct
  REGION 1..116: note = Description of Artificial Sequence: Synthetic polypeptide
  REGION 1..116: note = Synthetic Construct
QVQLQESGPGLVKPSETLSLTCTVSGYTVSRYWMHWIRQPPGKGLEWIGRIDPNSGGTKYNPSLKSRVTISVDTSKNQFSLKLSSVTAADTAVYYCVLTGTDFDYWGQGTLVTVSS

SEQ ID NO: 1277 - protein, 116 aa, synthetic construct
  REGION 1..116: note = Description of Artificial Sequence: Synthetic polypeptide
  REGION 1..116: note = Synthetic Construct
EVQLVESGGGLVKPGGSLRLSCAASGYTVSRYWMHWVRQAPGKGLEWIGRIDPNSGGTKYNAPVKGRFTISRDDSKNTLYLQMNSLKTEDTAVYYCVLTGTDFDYWGQGTLVTVSS

SEQ ID NO: 1278 - protein, 116 aa, synthetic construct
  REGION 1..116: note = Description of Artificial Sequence: Synthetic polypeptide
  REGION 1..116: note = Synthetic Construct
QVQLQESGPGLVKPSQTLSLTCTVSGYTVSRYWMHWIRQPPGKGLEWIGRIDPNSGGTKYNPSLKSRVTISVDTSKNQFSLKLSSVTAADTAVYYCVLTGTDFDYWGQGTLVTVSS

SEQ ID NO: 1279 - protein, 122 aa, synthetic construct
  REGION 1..122: note = Description of Artificial Sequence: Synthetic polypeptide
  REGION 1..122: note = Synthetic Construct
  MOD_RES 1: note = Glutamic acid or Glutamine
XVQLVESGGGLVQPKGSLKLSCAASGFSFNTYAMNWVRQAPGKGLEWIARIRSKSNNYATYYADSVKDRFTCSRDDSENMFYLQLSSLKTEDTAIYYCVRHGDGNLWYIDVWGTGTTVTVSS

SEQ ID NO: 1280 - protein, 122 aa, synthetic construct
  REGION 1..122: note = Description of Artificial Sequence: Synthetic polypeptide
  REGION 1..122: note = Synthetic Construct
EVQLVESGGGLVQPKGSLKLSCAASGFSFNTYAMNWVRQAPGKGLEWIARIRSKSNNYATYYADSVKDRFTCSRDDSENMFYLQLSSLKTEDTAMYYCVRHGDGNLWYIDVWGTGTTVTVSS

SEQ ID NO: 1281 - protein, 120 aa, synthetic construct
  REGION 1..120: note = Description of Artificial Sequence: Synthetic polypeptide
  REGION 1..120: note = Synthetic Construct
QVQLQQSGAELVKPGASVKMSCKTSGYPFSNFWITWVKQRPGQGLVWIGDIYPGSDNSNYNEKFKTKATLTVDTSSSTAYMHLSSLTSEDSAVYFCAREAYYTNPGFAYWGQGTLVTVST

SEQ ID NO: 1282 - protein, 120 aa, synthetic construct
  REGION 1..120: note = Description of Artificial Sequence: Synthetic polypeptide
  REGION 1..120: note = Synthetic Construct
EVQLVQSGAEVKKPGESLKISCKGSGYPFSNFWITWVRQMPGKGLEWIGDIYPGSDNSNYNPSFQGQVTISADKSISTAYLQWSSLKASDTAMYYCAREAYYTNPGFAYWGQGTLVTVSS

SEQ ID NO: 1283 - protein, 120 aa, synthetic construct
  REGION 1..120: note = Description of Artificial Sequence: Synthetic polypeptide
  REGION 1..120: note = Synthetic Construct
QVQLVQSGAEVKKPGSSVKVSCKASGYPFSNFWITWVRQAPGQGLEWIGDIYPGSDNSNYNQKFQGRVTITADESTSTAYMELSSLRSEDTAVYYCAREAYYTNPGFAYWGQGTLVTVSS

SEQ ID NO: 1284 - protein, 120 aa, synthetic construct
  REGION 1..120: note = Description of Artificial Sequence: Synthetic polypeptide
  REGION 1..120: note = Synthetic Construct
QVQLVQSGAEVKKPGASVKVSCKASGYPFSNFWITWVRQAPGQGLEWIGDIYPGSDNSNYNQKFQGRVTMTRDTSTSTVYMELSSLRSEDTAVYYCAREAYYTNPGFAYWGQGTLVTVSS

SEQ ID NO: 1285 - protein, 120 aa, synthetic construct
  REGION 1..120: note = Description of Artificial Sequence: Synthetic polypeptide
  REGION 1..120: note = Synthetic Construct
EVQLVESGGGLVQPGGSLRLSCAASGYPFSNFWITWVRQAPGKGLEWIGDIYPGSDNSNYNDSVKGRFTISRDNAKNSLYLQMNSLRAEDTAVYYCAREAYYTNPGFAYWGQGTLVTVSS

SEQ ID NO: 1286 - protein, 120 aa, synthetic construct
  REGION 1..120: note = Description of Artificial Sequence: Synthetic polypeptide
  REGION 1..120: note = Synthetic Construct
QVQLVESGGGVVQPGRSLRLSCAASGYPFSNFWITWVRQAPGKGLEWIGDIYPGSDNSNYNDSVKGRFTISRDNSKNTLYLQMNSLRAEDTAVYYCAREAYYTNPGFAYWGQGTLVTVSS

SEQ ID NO: 1287 - protein, 120 aa, synthetic construct
  REGION 1..120: note = Description of Artificial Sequence: Synthetic polypeptide
  REGION 1..120: note = Synthetic Construct
EVQLLESGGGLVQPGGSLRLSCAASGYPFSNFWITWVRQAPGKGLEWIGDIYPGSDNSNYNDSVKGRFTISRDNSKNTLYLQMNSLRAEDTAVYYCAREAYYTNPGFAYWGQGTLVTVSS

SEQ ID NO: 1288 - protein, 120 aa, synthetic construct
  REGION 1..120: note = Description of Artificial Sequence: Synthetic polypeptide
  REGION 1..120: note = Synthetic Construct
QVQLQESGPGLVKPSETLSLTCTVSGYPFSNFWITWIRQPPGKGLEWIGDIYPGSDNSNYNPSLKSRVTISVDTSKNQFSLKLSSVTAADTAVYYCAREAYYTNPGFAYWGQGTLVTVSS

SEQ ID NO: 1289 - protein, 120 aa, synthetic construct
  REGION 1..120: note = Description of Artificial Sequence: Synthetic polypeptide
  REGION 1..120: note = Synthetic Construct
EVQLVESGGGLVKPGGSLRLSCAASGYPFSNFWITWVRQAPGKGLEWIGDIYPGSDNSNYNAPVKGRFTISRDDSKNTLYLQMNSLKTEDTAVYYCAREAYYTNPGFAYWGQGTLVTVSS

SEQ ID NO: 1290 - protein, 120 aa, synthetic construct
  REGION 1..120: note = Description of Artificial Sequence: Synthetic polypeptide
  REGION 1..120: note = Synthetic Construct
QLQLQESGPGLVKPSETLSLTCTVSGYPFSNFWITWIRQPPGKGLEWIGDIYPGSDNSNYNPSLKSRVTISVDTSKNQFSLKLSSVTAADTAVYYCAREAYYTNPGFAYWGQGTLVTVSS

SEQ ID NO: 1291 - protein, 120 aa, synthetic construct
  REGION 1..120: note = Description of Artificial Sequence: Synthetic polypeptide
  REGION 1..120: note = Synthetic Construct
  MOD_RES 6..7: note = Glutamic acid or Glutamine
  MOD_RES 11: note = Any naturally occurring amino acid
  MOD_RES 18: note = Any Amino Acid
  MOD_RES 19..20: note = Any naturally occurring amino acid
  MOD_RES 24: note = Any naturally occurring amino acid
  MOD_RES 72: note = Any naturally occurring amino acid
  MOD_RES 83: note = Any naturally occurring amino acid
  MOD_RES 87..88: note = Any naturally occurring amino acid
  MOD_RES 90: note = Any naturally occurring amino acid
  MOD_RES 98: note = Any naturally occurring amino acid
EVQLVXXGRGXSQGKGSXXXGRAXRCLTSNTYTQTGVPQGPGKGREWESVIRSKSNNFSTLYADSVKDRFTXSRDDSESLFYXQMSXXKXEDTAMYYXVRHKSNRYPGVYWGQGTIVTVS

SEQ ID NO: 1292 - protein, 121 aa, synthetic construct
  REGION 1..121: note = Description of Artificial Sequence: Synthetic polypeptide
  REGION 1..121: note = Synthetic Construct
EVQLVESGGGLVKPGGSLRLSCAASGLTSNTYTQTWVRQAPGKGLEWESVIRSKSNNFSTLYAAPVKGRFTISRDDSKNTLYLQMNSLKTEDTAVYYCVRHKSNRYPGVYWGQGTLVTVSS

SEQ ID NO: 1293 - protein, 121 aa, synthetic construct
  REGION 1..121: note = Description of Artificial Sequence: Synthetic polypeptide
  REGION 1..121: note = Synthetic Construct
QVQLVESGGGVVQPGRSLRLSCAASGLTSNTYTQTWVRQAPGKGLEWESVIRSKSNNFSTLYADSVKGRFTISRDNSKNTLYLQMNSLRAEDTAVYYCVRHKSNRYPGVYWGQGTLVTVSS

SEQ ID NO: 1294 - protein, 121 aa, synthetic construct
  REGION 1..121: note = Description of Artificial Sequence: Synthetic polypeptide
  REGION 1..121: note = Synthetic Construct
EVQLLESGGGLVQPGGSLRLSCAASGLTSNTYTQTWVRQAPGKGLEWESVIRSKSNNFSTLYADSVKGRFTISRDNSKNTLYLQMNSLRAEDTAVYYCVRHKSNRYPGVYWGQGTLVTVSS

SEQ ID NO: 1295 - protein, 121 aa, synthetic construct
  REGION 1..121: note = Description of Artificial Sequence: Synthetic polypeptide
  REGION 1..121: note = Synthetic Construct
QVQLVQSGAEVKKPGASVKVSCKASGLTSNTYTQTWVRQAPGQGLEWESVIRSKSNNFSTLYAQKFQGRVTMTRDTSTSTVYMELSSLRSEDTAVYYCVRHKSNRYPGVYWGQGTLVTVSS

SEQ ID NO: 1296 - protein, 121 aa, synthetic construct
  REGION 1..121: note = Description of Artificial Sequence: Synthetic polypeptide
  REGION 1..121: note = Synthetic Construct
EVQLVESGGGLVQPGGSLRLSCAASGLTSNTYTQTWVRQAPGKGLEWESVIRSKSNNFSTLYADSVKGRFTISRDNAKNSLYLQMNSLRAEDTAVYYCVRHKSNRYPGVYWGQGTLVTVSS

SEQ ID NO: 1297 - protein, 121 aa, synthetic construct
  REGION 1..121: note = Description of Artificial Sequence: Synthetic polypeptide
  REGION 1..121: note = Synthetic Construct
QVQLVQSGAEVKKPGSSVKVSCKASGLTSNTYTQTWVRQAPGQGLEWESVIRSKSNNFSTLYAQKFQGRVTITADESTSTAYMELSSLRSEDTAVYYCVRHKSNRYPGVYWGQGTLVTVSS

SEQ ID NO: 1298 - protein, 121 aa, synthetic construct
  REGION 1..121: note = Description of Artificial Sequence: Synthetic polypeptide
  REGION 1..121: note = Synthetic Construct
EVQLVQSGAEVKKPGESLKISCKGSGLTSNTYTQTWVRQMPGKGLEWESVIRSKSNNFSTLYAPSFQGQVTISADKSISTAYLQWSSLKASDTAMYYCVRHKSNRYPGVYWGQGTLVTVSS

SEQ ID NO: 1299 - protein, 121 aa, synthetic construct
  REGION 1..121: note = Description of Artificial Sequence: Synthetic polypeptide
  REGION 1..121: note = Synthetic Construct
QVQLQESGPGLVKPSETLSLTCTVSGLTSNTYTQTWIRQPPGKGLEWESVIRSKSNNFSTLYAPSLKSRVTISVDTSKNQFSLKLSSVTAADTAVYYCVRHKSNRYPGVYWGQGTLVTVSS

SEQ ID NO: 1300 - protein, 121 aa, synthetic construct
  REGION 1..121: note = Description of Artificial Sequence: Synthetic polypeptide
  REGION 1..121: note = Synthetic Construct
QLQLQESGPGLVKPSETLSLTCTVSGLTSNTYTQTWIRQPPGKGLEWESVIRSKSNNFSTLYAPSLKSRVTISVDTSKNQFSLKLSSVTAADTAVYYCVRHKSNRYPGVYWGQGTLVTVSS

SEQ ID NO: 1301 - protein, 122 aa, synthetic construct
  REGION 1..122: note = Description of Artificial Sequence: Synthetic polypeptide
  REGION 1..122: note = Synthetic Construct
EVKLEESGGGLVQPGGSMKLSCTASGFTFSDAWMDWVRQSPEKGLEWVAEIRNKVNNHATYYAESVKGRFTISRDDSKSTVYLQMNSLRTEDTGIYYCTSLYDGYYLRFAYWGQGTLVTVSA

SEQ ID NO: 1302 - protein, 122 aa, synthetic construct
  REGION 1..122: note = Description of Artificial Sequence: Synthetic polypeptide
  REGION 1..122: note = Synthetic Construct
EVQLVESGGGLVKPGGSLRLSCAASGFTFSDAWMDWVRQAPGKGLEWWVAEIRNKVNNHATYYAPVKGRFTISRDDSKNTLYLQMNSLKTEDTAVYYCCTSLYDGYYLRFAWGQGTLVTVSS

SEQ ID NO: 1303 - protein, 122 aa, synthetic construct
  REGION 1..122: note = Description of Artificial Sequence: Synthetic polypeptide
  REGION 1..122: note = Synthetic Construct
EVQLVESGGGLVQPGGSLRLSCAASGFTFSDAWMDWVRQAPGKGLEWWVAEIRNKVNNHATYYDSVKGRFTISRDNAKNSLYLQMNSLRAEDTAVYYCCTSLYDGYYLRFAWGQGTLVTVSS

SEQ ID NO: 1304 - protein, 122 aa, synthetic construct
  REGION 1..122: note = Description of Artificial Sequence: Synthetic polypeptide
  REGION 1..122: note = Synthetic Construct
EVQLLESGGGLVQPGGSLRLSCAASGFTFSDAWMDWVRQAPGKGLEWWVAEIRNKVNNHATYYDSVKGRFTISRDNSKNTLYLQMNSLRAEDTAVYYCCTSLYDGYYLRFAWGQGTLVTVSS

SEQ ID NO: 1305 - protein, 122 aa, synthetic construct
  REGION 1..122: note = Description of Artificial Sequence: Synthetic polypeptide
  REGION 1..122: note = Synthetic Construct
QVQLVESGGGVVQPGRSLRLSCAASGFTFSDAWMDWVRQAPGKGLEWWVAEIRNKVNNHATYYDSVKGRFTISRDNSKNTLYLQMNSLRAEDTAVYYCCTSLYDGYYLRFAWGQGTLVTVSS

SEQ ID NO: 1306 - protein, 122 aa, synthetic construct
  REGION 1..122: note = Description of Artificial Sequence: Synthetic polypeptide
  REGION 1..122: note = Synthetic Construct
QVQLVQSGAEVKKPGASVKVSCKASGFTFSDAWMDWVRQAPGQGLEWWVAEIRNKVNNHATYYQKFQGRVTMTRDTSTSTVYMELSSLRSEDTAVYYCCTSLYDGYYLRFAWGQGTLVTVSS

SEQ ID NO: 1307 - protein, 122 aa, synthetic construct
  REGION 1..122: note = Description of Artificial Sequence: Synthetic polypeptide
  REGION 1..122: note = Synthetic Construct
QVQLVQSGAEVKKPGSSVKVSCKASGFTFSDAWMDWVRQAPGQGLEWWVAEIRNKVNNHATYYQKFQGRVTITADESTSTAYMELSSLRSEDTAVYYCCTSLYDGYYLRFAWGQGTLVTVSS

SEQ ID NO: 1308 - protein, 122 aa, synthetic construct
  REGION 1..122: note = Description of Artificial Sequence: Synthetic polypeptide
  REGION 1..122: note = Synthetic Construct
EVQLVQSGAEVKKPGESLKISCKGSGFTFSDAWMDWVRQMPGKGLEWWVAEIRNKVNNHATYYPSFQGQVTISADKSISTAYLQWSSLKASDTAMYYCCTSLYDGYYLRFAWGQGTLVTVSS

SEQ ID NO: 1309 - protein, 122 aa, synthetic construct
  REGION 1..122: note = Description of Artificial Sequence: Synthetic polypeptide
  REGION 1..122: note = Synthetic Construct
QVQLQESGPGLVKPSETLSLTCTVSGFTFSDAWMDWIRQPPGKGLEWWVAEIRNKVNNHATYYPSLKSRVTISVDTSKNQFSLKLSSVTAADTAVYYCCTSLYDGYYLRFAWGQGTLVTVSS

SEQ ID NO: 1310 - protein, 122 aa, synthetic construct
  REGION 1..122: note = Description of Artificial Sequence: Synthetic polypeptide
  REGION 1..122: note = Synthetic Construct
QLQLQESGPGLVKPSETLSLTCTVSGFTFSDAWMDWIRQPPGKGLEWWVAEIRNKVNNHATYYPSLKSRVTISVDTSKNQFSLKLSSVTAADTAVYYCCTSLYDGYYLRFAWGQGTLVTVSS

SEQ ID NO: 1311 - protein, 102 aa, synthetic construct
  REGION 1..102: note = Description of Artificial Sequence: Synthetic polypeptide
  REGION 1..102: note = Synthetic Construct
  MOD_RES 36: note = Glutamic acid or Glutamine
  MOD_RES 67: note = Glutamic acid or Glutamine
  MOD_RES 81: note = Any naturally occurring amino acid
  MOD_RES 83: note = Any naturally occurring amino acid
LSCAASGFTFNTYSMNWVRQAPGKGLEWVAHIKTKXNNFATFYADSVKDRFTISRDDSESMLYLQMXNLKTEDTAMYYCVXHXSNNYPFAYWGQGTLVTVSA

SEQ ID NO: 1312 - protein, 121 aa, synthetic construct
  REGION 1..121: note = Description of Artificial Sequence: Synthetic polypeptide
  REGION 1..121: note = Synthetic Construct
  MOD_RES 55: note = Glutamic acid or Glutamine
  MOD_RES 100: note = Glutamic acid or Glutamine
  MOD_RES 102: note = Any naturally occurring amino acid
EVQLVESGGGLVKPGGSLRLSCAASGFTFNTYSMNWVRQAPGKGLEWVAHIKTKXNNFATFYAAPVKGRFTISRDDSKNTLYLQMNSLKTEDTAVYYCVXHXSNNYPFAYWGQGTLVTVSS

SEQ ID NO: 1313 - protein, 121 aa, synthetic construct
  REGION 1..121: note = Description of Artificial Sequence: Synthetic polypeptide
  REGION 1..121: note = Synthetic Construct
  MOD_RES 55: note = Glutamic acid or Glutamine
  MOD_RES 100: note = Glutamic acid or Glutamine
  MOD_RES 102: note = Any naturally occurring amino acid
EVQLVESGGGLVQPGGSLRLSCAASGFTFNTYSMNWVRQAPGKGLEWVAHIKTKXNNFATFYADSVKGRFTISRDNAKNSLYLQMNSLRAEDTAVYYCVXHXSNNYPFAYWGQGTLVTVSS

SEQ ID NO: 1314 - protein, 121 aa, synthetic construct
  REGION 1..121: note = Description of Artificial Sequence: Synthetic polypeptide
  REGION 1..121: note = Synthetic Construct
  MOD_RES 55: note = Glutamic acid or Glutamine
  MOD_RES 100: note = Glutamic acid or Glutamine
  MOD_RES 102: note = Any naturally occurring amino acid
EVQLLESGGGLVQPGGSLRLSCAASGFTFNTYSMNWVRQAPGKGLEWVAHIKTKXNNFATFYADSVKGRFTISRDNSKNTLYLQMNSLRAEDTAVYYCVXHXSNNYPFAYWGQGTLVTVSS

SEQ ID NO: 1315 - protein, 121 aa, synthetic construct
  REGION 1..121: note = Description of Artificial Sequence: Synthetic polypeptide
  REGION 1..121: note = Synthetic Construct
  MOD_RES 55: note = Glutamic acid or Glutamine
  MOD_RES 100: note = Glutamic acid or Glutamine
  MOD_RES 102: note = Any naturally occurring amino acid
QVQLVESGGGVVQPGRSLRLSCAASGFTFNTYSMNWVRQAPGKGLEWVAHIKTKXNNFATFYADSVKGRFTISRDNSKNTLYLQMNSLRAEDTAVYYCVXHXSNNYPFAYWGQGTLVTVSS

SEQ ID NO: 1316 - protein, 121 aa, synthetic construct
  REGION 1..121: note = Description of Artificial Sequence: Synthetic polypeptide
  REGION 1..121: note = Synthetic Construct
  MOD_RES 55: note = Glutamic acid or Glutamine
  MOD_RES 100: note = Glutamic acid or Glutamine
  MOD_RES 102: note = Any naturally occurring amino acid
QVQLVQSGAEVKKPGASVKVSCKASGFTFNTYSMNWVRQAPGQGLEWVAHIKTKXNNFATFYAQKFQGRVTMTRDTSTSTVYMELSSLRSEDTAVYYCVXHXSNNYPFAYWGQGTLVTVSS

SEQ ID NO: 1317 - protein, 121 aa, synthetic construct
  REGION 1..121: note = Description of Artificial Sequence: Synthetic polypeptide
  REGION 1..121: note = Synthetic Construct
  MOD_RES 55: note = Glutamic acid or Glutamine
  MOD_RES 100: note = Glutamic acid or Glutamine
  MOD_RES 102: note = Any naturally occurring amino acid
QVQLVQSGAEVKKPGSSVKVSCKASGFTFNTYSMNWVRQAPGQGLEWVAHIKTKXNNFATFYAQKFQGRVTITADESTSTAYMELSSLRSEDTAVYYCVXHXSNNYPFAYWGQGTLVTVSS

SEQ ID NO: 1318 - protein, 121 aa, synthetic construct
  REGION 1..121: note = Description of Artificial Sequence: Synthetic polypeptide
  REGION 1..121: note = Synthetic Construct
  MOD_RES 55: note = Glutamic acid or Glutamine
  MOD_RES 100: note = Glutamic acid or Glutamine
  MOD_RES 102: note = Any naturally occurring amino acid
EVQLVQSGAEVKKPGESLKISCKGSGFTFNTYSMNWVRQMPGKGLEWVAHIKTKXNNFATFYAPSFQGQVTISADKSISTAYLQWSSLKASDTAMYYCVXHXSNNYPFAYWGQGTLVTVSS

SEQ ID NO: 1319 - protein, 121 aa, synthetic construct
  REGION 1..121: note = Description of Artificial Sequence: Synthetic polypeptide
  REGION 1..121: note = Synthetic Construct
  MOD_RES 55: note = Glutamic acid or Glutamine
  MOD_RES 100: note = Glutamic acid or Glutamine
  MOD_RES 102: note = Any naturally occurring amino acid
QVQLQESGPGLVKPSETLSLTCTVSGFTFNTYSMNWIRQPPGKGLEWVAHIKTKXNNFATFYAPSLKSRVTISVDTSKNQFSLKLSSVTAADTAVYYCVXHXSNNYPFAYWGQGTLVTVSS

SEQ ID NO: 1320 - protein, 121 aa, synthetic construct
  REGION 1..121: note = Description of Artificial Sequence: Synthetic polypeptide
  REGION 1..121: note = Synthetic Construct
  MOD_RES 55: note = Glutamic acid or Glutamine
  MOD_RES 100: note = Glutamic acid or Glutamine
  MOD_RES 102: note = Any naturally occurring amino acid
QVQLQESGPGLVKPSQTLSLTCTVSGFTFNTYSMNWIRQPPGKGLEWVAHIKTKXNNFATFYAPSLKSRVTISVDTSKNQFSLKLSSVTAADTAVYYCVXHXSNNYPFAYWGQGTLVTVSS

SEQ ID NO: 1321 - protein, 116 aa, synthetic construct
  REGION 1..116: note = Description of Artificial Sequence: Synthetic polypeptide
  REGION 1..116: note = Synthetic Construct
  MOD_RES 91: note = Glutamic acid or Glutamine
QVQLQQSGAVLVKPGASVKLSCKASGYTFTTYWIHWVKQRPGRGPEWIGRNDPNSGGSNYNEKFRNKAILTVDKPSSTAYMQLNSLTSEDXAVYYCVRTNWDGDFWGQGTTLTVSS

SEQ ID NO: 1322 - protein, 116 aa, synthetic construct
  REGION 1..116: note = Description of Artificial Sequence: Synthetic polypeptide
  REGION 1..116: note = Synthetic Construct
QVQLVQSGAEVKKPGASVKVSCKASGYTFTTYWIHWVRQAPGQGLEWIGRNDPNSGGSNYNQKFQGRVTMTRDTSTSTVYMELSSLRSEDTAVYYCVRTNWDGDFWGQGTLVTVSS

SEQ ID NO: 1323 - protein, 116 aa, synthetic construct
  REGION 1..116: note = Description of Artificial Sequence: Synthetic polypeptide
  REGION 1..116: note = Synthetic Construct
EVQLVQSGAEVKKPGESLKISCKGSGYTFTTYWIHWVRQMPGKGLEWIGRNDPNSGGSNYNPSFQGQVTISADKSISTAYLQWSSLKASDTAMYYCVRTNWDGDFWGQGTLVTVSS

SEQ ID NO: 1324 - protein, 116 aa, synthetic construct
  REGION 1..116: note = Description of Artificial Sequence: Synthetic polypeptide
  REGION 1..116: note = Synthetic Construct
QVQLVQSGAEVKKPGSSVKVSCKASGYTFTTYWIHWVRQAPGQGLEWIGRNDPNSGGSNYNQKFQGRVTITADESTSTAYMELSSLRSEDTAVYYCVRTNWDGDFWGQGTLVTVSS

SEQ ID NO: 1325 - protein, 116 aa, synthetic construct
  REGION 1..116: note = Description of Artificial Sequence: Synthetic polypeptide
  REGION 1..116: note = Synthetic Construct
EVQLLESGGGLVQPGGSLRLSCAASGYTFTTYWIHWVRQAPGKGLEWIGRNDPNSGGSNYNDSVKGRFTISRDNSKNTLYLQMNSLRAEDTAVYYCVRTNWDGDFWGQGTLVTVSS

SEQ ID NO: 1326 - protein, 116 aa, synthetic construct
  REGION 1..116: note = Description of Artificial Sequence: Synthetic polypeptide
  REGION 1..116: note = Synthetic Construct
EVQLVESGGGLVQPGGSLRLSCAASGYTFTTYWIHWVRQAPGKGLEWIGRNDPNSGGSNYNDSVKGRFTISRDNAKNSLYLQMNSLRAEDTAVYYCVRTNWDGDFWGQGTLVTVSS

SEQ ID NO: 1327 - protein, 116 aa, synthetic construct
  REGION 1..116: note = Description of Artificial Sequence: Synthetic polypeptide
  REGION 1..116: note = Synthetic Construct
QVQLVESGGGVVQPGRSLRLSCAASGYTFTTYWIHWVRQAPGKGLEWIGRNDPNSGGSNYNDSVKGRFTISRDNSKNTLYLQMNSLRAEDTAVYYCVRTNWDGDFWGQGTLVTVSS

SEQ ID NO: 1328 - protein, 116 aa, synthetic construct
  REGION 1..116: note = Description of Artificial Sequence: Synthetic polypeptide
  REGION 1..116: note = Synthetic Construct
QVQLQESGPGLVKPSETLSLTCTVSGYTFTTYWIHWIRQPPGKGLEWIGRNDPNSGGSNYNPSLKSRVTISVDTSKNQFSLKLSSVTAADTAVYYCVRTNWDGDFWGQGTLVTVSS

SEQ ID NO: 1329 - protein, 116 aa, synthetic construct
  REGION 1..116: note = Description of Artificial Sequence: Synthetic polypeptide
  REGION 1..116: note = Synthetic Construct
EVQLVESGGGLVKPGGSLRLSCAASGYTFTTYWIHWVRQAPGKGLEWIGRNDPNSGGSNYNAPVKGRFTISRDDSKNTLYLQMNSLKTEDTAVYYCVRTNWDGDFWGQGTLVTVSS

SEQ ID NO: 1330 - protein, 116 aa, synthetic construct
  REGION 1..116: note = Description of Artificial Sequence: Synthetic polypeptide
  REGION 1..116: note = Synthetic Construct
QVQLQESGPGLVKPSQTLSLTCTVSGYTFTTYWIHWIRQPPGKGLEWIGRNDPNSGGSNYNPSLKSRVTISVDTSKNQFSLKLSSVTAADTAVYYCVRTNWDGDFWGQGTLVTVSS

SEQ ID NO: 1331 - protein, 126 aa, synthetic construct
  REGION 1..126: note = Description of Artificial Sequence: Synthetic polypeptide
  REGION 1..126: note = Synthetic Construct
EVQLQQSGAELVKPGASVKISCKASGYAFSNYWMSWVKQRPGKGLEWIGQIYPGDGDTKYNGKFEGKATLTADKSSSTAYMQLSSLTSEDSAVYFCSREKGADYYGSTYSAWFSYWGQGTLVTVSA

SEQ ID NO: 1332 - protein, 126 aa, synthetic construct
  REGION 1..126: note = Description of Artificial Sequence: Synthetic polypeptide
  REGION 1..126: note = Synthetic Construct
EVQLVQSGAEVKKPGESLKISCKGSGYAFSNYWMSWVRQMPGKGLEWIGQIYPGDGDTKYNPSFQGQVTISADKSISTAYLQWSSLKASDTAMYYCSREKGADYYGSTYSAWFSYWGQGTLVTVSS

SEQ ID NO: 1333 - protein, 126 aa, synthetic construct
  REGION 1..126: note = Description of Artificial Sequence: Synthetic polypeptide
  REGION 1..126: note = Synthetic Construct
QVQLVQSGAEVKKPGASVKVSCKASGYAFSNYWMSWVRQAPGQGLEWIGQIYPGDGDTKYNQKFQGRVTMTRDTSTSTVYMELSSLRSEDTAVYYCSREKGADYYGSTYSAWFSYWGQGTLVTVSS

SEQ ID NO: 1334 - protein, 126 aa, synthetic construct
  REGION 1..126: note = Description of Artificial Sequence: Synthetic polypeptide
  REGION 1..126: note = Synthetic Construct
EVQLLESGGGLVQPGGSLRLSCAASGYAFSNYWMSWVRQAPGKGLEWIGQIYPGDGDTKYNDSVKGRFTISRDNSKNTLYLQMNSLRAEDTAVYYCSREKGADYYGSTYSAWFSYWGQGTLVTVSS

SEQ ID NO: 1335 - protein, 126 aa, synthetic construct
  REGION 1..126: note = Description of Artificial Sequence: Synthetic polypeptide
  REGION 1..126: note = Synthetic Construct
QVQLVQSGAEVKKPGSSVKVSCKASGYAFSNYWMSWVRQAPGQGLEWIGQIYPGDGDTKYNQKFQGRVTITADESTSTAYMELSSLRSEDTAVYYCSREKGADYYGSTYSAWFSYWGQGTLVTVSS

SEQ ID NO: 1336 - protein, 126 aa, synthetic construct
  REGION 1..126: note = Description of Artificial Sequence: Synthetic polypeptide
  REGION 1..126: note = Synthetic Construct
EVQLVESGGGLVQPGGSLRLSCAASGYAFSNYWMSWVRQAPGKGLEWIGQIYPGDGDTKYNDSVKGRFTISRDNAKNSLYLQMNSLRAEDTAVYYCSREKGADYYGSTYSAWFSYWGQGTLVTVSS

SEQ ID NO: 1337 - protein, 126 aa, synthetic construct
  REGION 1..126: note = Description of Artificial Sequence: Synthetic polypeptide
  REGION 1..126: note = Synthetic Construct
QVQLVESGGGVVQPGRSLRLSCAASGYAFSNYWMSWVRQAPGKGLEWIGQIYPGDGDTKYNDSVKGRFTISRDNSKNTLYLQMNSLRAEDTAVYYCSREKGADYYGSTYSAWFSYWGQGTLVTVSS

SEQ ID NO: 1338 - protein, 126 aa, synthetic construct
  REGION 1..126: note = Description of Artificial Sequence: Synthetic polypeptide
  REGION 1..126: note = Synthetic Construct
QVQLQESGPGLVKPSETLSLTCTVSGYAFSNYWMSWIRQPPGKGLEWIGQIYPGDGDTKYNPSLKSRVTISVDTSKNQFSLKLSSVTAADTAVYYCSREKGADYYGSTYSAWFSYWGQGTLVTVSS

SEQ ID NO: 1339 - protein, 126 aa, synthetic construct
  REGION 1..126: note = Description of Artificial Sequence: Synthetic polypeptide
  REGION 1..126: note = Synthetic Construct
EVQLVESGGGLVKPGGSLRLSCAASGYAFSNYWMSWVRQAPGKGLEWIGQIYPGDGDTKYNAPVKGRFTISRDDSKNTLYLQMNSLKTEDTAVYYCSREKGADYYGSTYSAWFSYWGQGTLVTVSS

SEQ ID NO: 1340 - protein, 126 aa, synthetic construct
  REGION 1..126: note = Description of Artificial Sequence: Synthetic polypeptide
  REGION 1..126: note = Synthetic Construct
QVQLQESGPGLVKPSQTLSLTCTVSGYAFSNYWMSWIRQPPGKGLEWIGQIYPGDGDTKYNPSLKSRVTISVDTSKNQFSLKLSSVTAADTAVYYCSREKGADYYGSTYSAWFSYWGQGTLVTVSS

SEQ ID NO: 1341 - protein, 123 aa, synthetic construct
  REGION 1..123: note = Description of Artificial Sequence: Synthetic polypeptide
  REGION 1..123: note = Synthetic Construct
QVQLQQSGPELVKPGASLKISCKASGYAFSSSWMNWVKQRPGKGLEWIGRIYPGDGDTNYNGEFRVRATLTADTSSTTAYMQLSSLTSEDSAVYFCARLLRNQPGESYAMDYWGQGASVTVSS

SEQ ID NO: 1342 - protein, 123 aa, synthetic construct
  REGION 1..123: note = Description of Artificial Sequence: Synthetic polypeptide
  REGION 1..123: note = Synthetic Construct
EVQLVQSGAEVKKPGESLKISCKGSGYAFSSSWMNWVRQMPGKGLEWIGRIYPGDGDTNYNPSFQGQVTISADKSISTAYLQWSSLKASDTAMYYCARLLRNQPGESYAMDYWGQGTLVTVSS

SEQ ID NO: 1343 - protein, 123 aa, synthetic construct
  REGION 1..123: note = Description of Artificial Sequence: Synthetic polypeptide
  REGION 1..123: note = Synthetic Construct
QVQLVQSGAEVKKPGASVKVSCKASGYAFSSSWMNWVRQAPGQGLEWIGRIYPGDGDTNYNQKFQGRVTMTRDTSTSTVYMELSSLRSEDTAVYYCARLLRNQPGESYAMDYWGQGTLVTVSS

SEQ ID NO: 1344 - protein, 123 aa, synthetic construct
  REGION 1..123: note = Description of Artificial Sequence: Synthetic polypeptide
  REGION 1..123: note = Synthetic Construct
QVQLVQSGAEVKKPGSSVKVSCKASGYAFSSSWMNWVRQAPGQGLEWIGRIYPGDGDTNYNQKFQGRVTITADESTSTAYMELSSLRSEDTAVYYCARLLRNQPGESYAMDYWGQGTLVTVSS

SEQ ID NO: 1345 - protein, 123 aa, synthetic construct
  REGION 1..123: note = Description of Artificial Sequence: Synthetic polypeptide
  REGION 1..123: note = Synthetic Construct
EVQLLESGGGLVQPGGSLRLSCAASGYAFSSSWMNWVRQAPGKGLEWIGRIYPGDGDTNYNDSVKGRFTISRDNSKNTLYLQMNSLRAEDTAVYYCARLLRNQPGESYAMDYWGQGTLVTVSS

SEQ ID NO: 1346 - protein, 123 aa, synthetic construct
  REGION 1..123: note = Description of Artificial Sequence: Synthetic polypeptide
  REGION 1..123: note = Synthetic Construct
EVQLVESGGGLVQPGGSLRLSCAASGYAFSSSWMNWVRQAPGKGLEWIGRIYPGDGDTNYNDSVKGRFTISRDNAKNSLYLQMNSLRAEDTAVYYCARLLRNQPGESYAMDYWGQGTLVTVSS

SEQ ID NO: 1347 - protein, 123 aa, synthetic construct
  REGION 1..123: note = Description of Artificial Sequence: Synthetic polypeptide
  REGION 1..123: note = Synthetic Construct
QVQLVESGGGVVQPGRSLRLSCAASGYAFSSSWMNWVRQAPGKGLEWIGRIYPGDGDTNYNDSVKGRFTISRDNSKNTLYLQMNSLRAEDTAVYYCARLLRNQPGESYAMDYWGQGTLVTVSS

SEQ ID NO: 1348 - protein, 123 aa, synthetic construct
  REGION 1..123: note = Description of Artificial Sequence: Synthetic polypeptide
  REGION 1..123: note = Synthetic Construct
QVQLQESGPGLVKPSETLSLTCTVSGYAFSSSWMNWIRQPPGKGLEWIGRIYPGDGDTNYNPSLKSRVTISVDTSKNQFSLKLSSVTAADTAVYYCARLLRNQPGESYAMDYWGQGTLVTVSS

SEQ ID NO: 1349 - protein, 123 aa, synthetic construct
  REGION 1..123: note = Description of Artificial Sequence: Synthetic polypeptide
  REGION 1..123: note = Synthetic Construct
EVQLVESGGGLVKPGGSLRLSCAASGYAFSSSWMNWVRQAPGKGLEWIGRIYPGDGDTNYNAPVKGRFTISRDDSKNTLYLQMNSLKTEDTAVYYCARLLRNQPGESYAMDYWGQGTLVTVSS

SEQ ID NO: 1350 - protein, 123 aa, synthetic construct
  REGION 1..123: note = Description of Artificial Sequence: Synthetic polypeptide
  REGION 1..123: note = Synthetic Construct
QVQLQESGPGLVKPSQTLSLTCTVSGYAFSSSWMNWIRQPPGKGLEWIGRIYPGDGDTNYNPSLKSRVTISVDTSKNQFSLKLSSVTAADTAVYYCARLLRNQPGESYAMDYWGQGTLVTVSS

SEQ ID NO: 1351 - protein, 116 aa, synthetic construct
  REGION 1..116: note = Description of Artificial Sequence: Synthetic polypeptide
  REGION 1..116: note = Synthetic Construct
QVQLQQSGAELVKPGASVKLSCKASGYIFTTYWIHWVKQRPGRGPEWIGRIDPNNGDTNYNEKFKTKATLTVDKPSSTADMQLSSLTSEDSAVYYCVMTGTDFDYWGQGTTLTVSS

SEQ ID NO: 1352 - protein, 116 aa, synthetic construct
  REGION 1..116: note = Description of Artificial Sequence: Synthetic polypeptide
  REGION 1..116: note = Synthetic Construct
EVQLVQSGAEVKKPGESLKISCKGSGYIFTTYWIHWVRQMPGKGLEWIGRIDPNNGDTNYNPSFQGQVTISADKSISTAYLQWSSLKASDTAMYYCVMTGTDFDYWGQGTLVTVSS

SEQ ID NO: 1353 - protein, 116 aa, synthetic construct
  REGION 1..116: note = Description of Artificial Sequence: Synthetic polypeptide
  REGION 1..116: note = Synthetic Construct
QVQLVQSGAEVKKPGASVKVSCKASGYIFTTYWIHWVRQAPGQGLEWIGRIDPNNGDTNYNQKFQGRVTMTRDTSTSTVYMELSSLRSEDTAVYYCVMTGTDFDYWGQGTLVTVSS

SEQ ID NO: 1354 - protein, 116 aa, synthetic construct
  REGION 1..116: note = Description of Artificial Sequence: Synthetic polypeptide
  REGION 1..116: note = Synthetic Construct
QVQLVQSGAEVKKPGSSVKVSCKASGYIFTTYWIHWVRQAPGQGLEWIGRIDPNNGDTNYNQKFQGRVTITADESTSTAYMELSSLRSEDTAVYYCVMTGTDFDYWGQGTLVTVSS

SEQ ID NO: 1355 - protein, 116 aa, synthetic construct
  REGION 1..116: note = Description of Artificial Sequence: Synthetic polypeptide
  REGION 1..116: note = Synthetic Construct
EVQLLESGGGLVQPGGSLRLSCAASGYIFTTYWIHWVRQAPGKGLEWIGRIDPNNGDTNYNDSVKGRFTISRDNSKNTLYLQMNSLRAEDTAVYYCVMTGTDFDYWGQGTLVTVSS

SEQ ID NO: 1356 - protein, 116 aa, synthetic construct
  REGION 1..116: note = Description of Artificial Sequence: Synthetic polypeptide
  REGION 1..116: note = Synthetic Construct
QVQLVESGGGVVQPGRSLRLSCAASGYIFTTYWIHWVRQAPGKGLEWIGRIDPNNGDTNYNDSVKGRFTISRDNSKNTLYLQMNSLRAEDTAVYYCVMTGTDFDYWGQGTLVTVSS

SEQ ID NO: 1357 - protein, 116 aa, synthetic construct
  REGION 1..116: note = Description of Artificial Sequence: Synthetic polypeptide
  REGION 1..116: note = Synthetic Construct
EVQLVESGGGLVQPGGSLRLSCAASGYIFTTYWIHWVRQAPGKGLEWIGRIDPNNGDTNYNDSVKGRFTISRDNAKNSLYLQMNSLRAEDTAVYYCVMTGTDFDYWGQGTLVTVSS

SEQ ID NO: 1358 - protein, 116 aa, synthetic construct
  REGION 1..116: note = Description of Artificial Sequence: Synthetic polypeptide
  REGION 1..116: note = Synthetic Construct
QVQLQESGPGLVKPSETLSLTCTVSGYIFTTYWIHWIRQPPGKGLEWIGRIDPNNGDTNYNPSLKSRVTISVDTSKNQFSLKLSSVTAADTAVYYCVMTGTDFDYWGQGTLVTVSS

SEQ ID NO: 1359 - protein, 116 aa, synthetic construct
  REGION 1..116: note = Description of Artificial Sequence: Synthetic polypeptide
  REGION 1..116: note = Synthetic Construct
EVQLVESGGGLVKPGGSLRLSCAASGYIFTTYWIHWVRQAPGKGLEWIGRIDPNNGDTNYNAPVKGRFTISRDDSKNTLYLQMNSLKTEDTAVYYCVMTGTDFDYWGQGTLVTVSS

SEQ ID NO: 1360 - protein, 116 aa, synthetic construct
  REGION 1..116: note = Description of Artificial Sequence: Synthetic polypeptide
  REGION 1..116: note = Synthetic Construct
QVQLQESGPGLVKPSQTLSLTCTVSGYIFTTYWIHWIRQPPGKGLEWIGRIDPNNGDTNYNPSLKSRVTISVDTSKNQFSLKLSSVTAADTAVYYCVMTGTDFDYWGQGTLVTVSS

SEQ ID NO: 1361 - protein, 120 aa, synthetic construct
  REGION 1..120: note = Description of Artificial Sequence: Synthetic polypeptide
  REGION 1..120: note = Synthetic Construct
QVQLQQSGAEVVKPGASVKMSCKTSGYPFSNFWITWVKQRPGQGLVWIGDIYPGSDNRNFNERFKTKATLTVDTSSSTAYMHLSSLTSEDSAVYFCAREAYYTNPGFAYWGQGTLVTVSA

SEQ ID NO: 1362 - protein, 120 aa, synthetic construct
  REGION 1..120: note = Description of Artificial Sequence: Synthetic polypeptide
  REGION 1..120: note = Synthetic Construct
EVQLVQSGAEVKKPGESLKISCKGSGYPFSNFWITWVRQMPGKGLEWIGDIYPGSDNRNFNPSFQGQVTISADKSISTAYLQWSSLKASDTAMYYCAREAYYTNPGFAYWGQGTLVTVSS

SEQ ID NO: 1363 - protein, 120 aa, synthetic construct
  REGION 1..120: note = Description of Artificial Sequence: Synthetic polypeptide
  REGION 1..120: note = Synthetic Construct
QVQLVQSGAEVKKPGSSVKVSCKASGYPFSNFWITWVRQAPGQGLEWIGDIYPGSDNRNFNQKFQGRVTITADESTSTAYMELSSLRSEDTAVYYCAREAYYTNPGFAYWGQGTLVTVSS

SEQ ID NO: 1364 - protein, 120 aa, synthetic construct
  REGION 1..120: note = Description of Artificial Sequence: Synthetic polypeptide
  REGION 1..120: note = Synthetic Construct
QVQLVQSGAEVKKPGASVKVSCKASGYPFSNFWITWVRQAPGQGLEWIGDIYPGSDNRNFNQKFQGRVTMTRDTSTSTVYMELSSLRSEDTAVYYCAREAYYTNPGFAYWGQGTLVTVSS

SEQ ID NO: 1365 - protein, 120 aa, synthetic construct
  REGION 1..120: note = Description of Artificial Sequence: Synthetic polypeptide
  REGION 1..120: note = Synthetic Construct
EVQLVESGGGLVQPGGSLRLSCAASGYPFSNFWITWVRQAPGKGLEWIGDIYPGSDNRNFNDSVKGRFTISRDNAKNSLYLQMNSLRAEDTAVYYCAREAYYTNPGFAYWGQGTLVTVSS

SEQ ID NO: 1366 - protein, 120 aa, synthetic construct
  REGION 1..120: note = Description of Artificial Sequence: Synthetic polypeptide
  REGION 1..120: note = Synthetic Construct
QVQLVESGGGVVQPGRSLRLSCAASGYPFSNFWITWVRQAPGKGLEWIGDIYPGSDNRNFNDSVKGRFTISRDNSKNTLYLQMNSLRAEDTAVYYCAREAYYTNPGFAYWGQGTLVTVSS

SEQ ID NO: 1367 - protein, 120 aa, synthetic construct
  REGION 1..120: note = Description of Artificial Sequence: Synthetic polypeptide
  REGION 1..120: note = Synthetic Construct
EVQLLESGGGLVQPGGSLRLSCAASGYPFSNFWITWVRQAPGKGLEWIGDIYPGSDNRNFNDSVKGRFTISRDNSKNTLYLQMNSLRAEDTAVYYCAREAYYTNPGFAYWGQGTLVTVSS

SEQ ID NO: 1368 - protein, 120 aa, synthetic construct
  REGION 1..120: note = Description of Artificial Sequence: Synthetic polypeptide
  REGION 1..120: note = Synthetic Construct
QVQLQESGPGLVKPSETLSLTCTVSGYPFSNFWITWIRQPPGKGLEWIGDIYPGSDNRNFNPSLKSRVTISVDTSKNQFSLKLSSVTAADTAVYYCAREAYYTNPGFAYWGQGTLVTVSS

SEQ ID NO: 1369 - protein, 120 aa, synthetic construct
  REGION 1..120: note = Description of Artificial Sequence: Synthetic polypeptide
  REGION 1..120: note = Synthetic Construct
EVQLVESGGGLVKPGGSLRLSCAASGYPFSNFWITWVRQAPGKGLEWIGDIYPGSDNRNFNAPVKGRFTISRDDSKNTLYLQMNSLKTEDTAVYYCAREAYYTNPGFAYWGQGTLVTVSS

SEQ ID NO: 1370 - protein, 120 aa, synthetic construct
  REGION 1..120: note = Description of Artificial Sequence: Synthetic polypeptide
  REGION 1..120: note = Synthetic Construct
QLQLQESGPGLVKPSETLSLTCTVSGYPFSNFWITWIRQPPGKGLEWIGDIYPGSDNRNFNPSLKSRVTISVDTSKNQFSLKLSSVTAADTAVYYCAREAYYTNPGFAYWGQGTLVTVSS

SEQ ID NO: 1371 - protein, 122 aa, synthetic construct
  REGION 1..122: note = Description of Artificial Sequence: Synthetic polypeptide
  REGION 1..122: note = Synthetic Construct
EVQLVESGGRLVQPKGSLKLSCAASGFNFNTYAMNWVRQAPGKGLEWVARIRSKSNNYATYYADSVKDRFTISRDDSESMLYLQMNNLKTEDTAMYYCVRHYSNYGWGFAYWGQGTLVTVSA

SEQ ID NO: 1372 - protein, 122 aa, synthetic construct
  REGION 1..122: note = Description of Artificial Sequence: Synthetic polypeptide
  REGION 1..122: note = Synthetic Construct
EVQLVESGGGLVKPGGSLRLSCAASGFNFNTYAMNWVRQAPGKGLEWVARIRSKSNNYATYYAAPVKGRFTISRDDSKNTLYLQMNSLKTEDTAVYYCVRHYSNYGWGFAYWGQGTLVTVSS

SEQ ID NO: 1373 - protein, 122 aa, synthetic construct
  REGION 1..122: note = Description of Artificial Sequence: Synthetic polypeptide
  REGION 1..122: note = Synthetic Construct
EVQLVESGGGLVQPGGSLRLSCAASGFNFNTYAMNWVRQAPGKGLEWVARIRSKSNNYATYYADSVKGRFTISRDNAKNSLYLQMNSLRAEDTAVYYCVRHYSNYGWGFAYWGQGTLVTVSS

SEQ ID NO: 1374 - protein, 122 aa, synthetic construct
  REGION 1..122: note = Description of Artificial Sequence: Synthetic polypeptide
  REGION 1..122: note = Synthetic Construct
EVQLLESGGGLVQPGGSLRLSCAASGFNFNTYAMNWVRQAPGKGLEWVARIRSKSNNYATYYADSVKGRFTISRDNSKNTLYLQMNSLRAEDTAVYYCVRHYSNYGWGFAYWGQGTLVTVSS

SEQ ID NO: 1375 - protein, 122 aa, synthetic construct
  REGION 1..122: note = Description of Artificial Sequence: Synthetic polypeptide
  REGION 1..122: note = Synthetic Construct
QVQLVESGGGVVQPGRSLRLSCAASGFNFNTYAMNWVRQAPGKGLEWVARIRSKSNNYATYYADSVKGRFTISRDNSKNTLYLQMNSLRAEDTAVYYCVRHYSNYGWGFAYWGQGTLVTVSS

SEQ ID NO: 1376 - protein, 122 aa, synthetic construct
  REGION 1..122: note = Description of Artificial Sequence: Synthetic polypeptide
  REGION 1..122: note = Synthetic Construct
QVQLVQSGAEVKKPGSSVKVSCKASGFNFNTYAMNWVRQAPGQGLEWVARIRSKSNNYATYYAQKFQGRVTITADESTSTAYMELSSLRSEDTAVYYCVRHYSNYGWGFAYWGQGTLVTVSS

SEQ ID NO: 1377 - protein, 122 aa, synthetic construct
  REGION 1..122: note = Description of Artificial Sequence: Synthetic polypeptide
  REGION 1..122: note = Synthetic Construct
QVQLVQSGAEVKKPGASVKVSCKASGFNFNTYAMNWVRQAPGQGLEWVARIRSKSNNYATYYAQKFQGRVTMTRDTSTSTVYMELSSLRSEDTAVYYCVRHYSNYGWGFAYWGQGTLVTVSS

SEQ ID NO: 1378 - protein, 122 aa, synthetic construct
  REGION 1..122: note = Description of Artificial Sequence: Synthetic polypeptide
  REGION 1..122: note = Synthetic Construct
EVQLVQSGAEVKKPGESLKISCKGSGFNFNTYAMNWVRQMPGKGLEWVARIRSKSNNYATYYAPSFQGQVTISADKSISTAYLQWSSLKASDTAMYYCVRHYSNYGWGFAYWGQGTLVTVSS

SEQ ID NO: 1379 - protein, 122 aa, synthetic construct
  REGION 1..122: note = Description of Artificial Sequence: Synthetic polypeptide
  REGION 1..122: note = Synthetic Construct
QVQLQESGPGLVKPSETLSLTCTVSGFNFNTYAMNWIRQPPGKGLEWVARIRSKSNNYATYYAPSLKSRVTISVDTSKNQFSLKLSSVTAADTAVYYCVRHYSNYGWGFAYWGQGTLVTVSS

SEQ ID NO: 1380 - protein, 122 aa, synthetic construct
  REGION 1..122: note = Description of Artificial Sequence: Synthetic polypeptide
  REGION 1..122: note = Synthetic Construct
QLQLQESGPGLVKPSETLSLTCTVSGFNFNTYAMNWIRQPPGKGLEWVARIRSKSNNYATYYAPSLKSRVTISVDTSKNQFSLKLSSVTAADTAVYYCVRHYSNYGWGFAYWGQGTLVTVSS

SEQ ID NO: 1381 - protein, 113 aa, synthetic construct
  REGION 1..113: note = Description of Artificial Sequence: Synthetic polypeptide
  REGION 1..113: note = Synthetic Construct
  MOD_RES 95: note = Glutamic acid or Glutamine
QVQLQQYGPELVKPGASVKMSCKVSGYTFSDYYIHWMKQSHGKSLEWIGYIYPNNGDNGYNQEFKGKATLTVDKSSSTAYMELRSLTFEDSAVYXCARRGYYGGSYDYWGQGT

SEQ ID NO: 1382 - protein, 119 aa, synthetic construct
  REGION 1..119: note = Description of Artificial Sequence: Synthetic polypeptide
  REGION 1..119: note = Synthetic Construct
QVQLVQSGAEVKKPGASVKVSCKASGYTFSDYYIHWVRQAPGQGLEWIGYIYPNNGDNGYNQKFQGRVTMTRDTSTSTVYMELSSLRSEDTAVYYCARRGYYGGSYDYWGQGTLVTVSS

SEQ ID NO: 1383 - protein, 119 aa, synthetic construct
  REGION 1..119: note = Description of Artificial Sequence: Synthetic polypeptide
  REGION 1..119: note = Synthetic Construct
EVQLVQSGAEVKKPGESLKISCKGSGYTFSDYYIHWVRQMPGKGLEWIGYIYPNNGDNGYNPSFQGQVTISADKSISTAYLQWSSLKASDTAMYYCARRGYYGGSYDYWGQGTLVTVSS

SEQ ID NO: 1384 - protein, 119 aa, synthetic construct
  REGION 1..119: note = Description of Artificial Sequence: Synthetic polypeptide
  REGION 1..119: note = Synthetic Construct
QVQLVQSGAEVKKPGSSVKVSCKASGYTFSDYYIHWVRQAPGQGLEWIGYIYPNNGDNGYNQKFQGRVTITADESTSTAYMELSSLRSEDTAVYYCARRGYYGGSYDYWGQGTLVTVSS

SEQ ID NO: 1385 - protein, 119 aa, synthetic construct
  REGION 1..119: note = Description of Artificial Sequence: Synthetic polypeptide
  REGION 1..119: note = Synthetic Construct
EVQLVESGGGLVQPGGSLRLSCAASGYTFSDYYIHWVRQAPGKGLEWIGYIYPNNGDNGYNDSVKGRFTISRDNAKNSLYLQMNSLRAEDTAVYYCARRGYYGGSYDYWGQGTLVTVSS

SEQ ID NO: 1386 - protein, 119 aa, synthetic construct
  REGION 1..119: note = Description of Artificial Sequence: Synthetic polypeptide
  REGION 1..119: note = Synthetic Construct
QVQLVESGGGVVQPGRSLRLSCAASGYTFSDYYIHWVRQAPGKGLEWIGYIYPNNGDNGYNDSVKGRFTISRDNSKNTLYLQMNSLRAEDTAVYYCARRGYYGGSYDYWGQGTLVTVSS

SEQ ID NO: 1387 - protein, 119 aa, synthetic construct
  REGION 1..119: note = Description of Artificial Sequence: Synthetic polypeptide
  REGION 1..119: note = Synthetic Construct
EVQLLESGGGLVQPGGSLRLSCAASGYTFSDYYIHWVRQAPGKGLEWIGYIYPNNGDNGYNDSVKGRFTISRDNSKNTLYLQMNSLRAEDTAVYYCARRGYYGGSYDYWGQGTLVTVSS

SEQ ID NO: 1388 - protein, 119 aa, synthetic construct
  REGION 1..119: note = Description of Artificial Sequence: Synthetic polypeptide
  REGION 1..119: note = Synthetic Construct
QVQLQESGPGLVKPSETLSLTCTVSGYTFSDYYIHWIRQPPGKGLEWIGYIYPNNGDNGYNPSLKSRVTISVDTSKNQFSLKLSSVTAADTAVYYCARRGYYGGSYDYWGQGTLVTVSS

SEQ ID NO: 1389 - protein, 119 aa, synthetic construct
  REGION 1..119: note = Description of Artificial Sequence: Synthetic polypeptide
  REGION 1..119: note = Synthetic Construct
EVQLVESGGGLVKPGGSLRLSCAASGYTFSDYYIHWVRQAPGKGLEWIGYIYPNNGDNGYNAPVKGRFTISRDDSKNTLYLQMNSLKTEDTAVYYCARRGYYGGSYDYWGQGTLVTVSS

SEQ ID NO: 1390 - protein, 119 aa, synthetic construct
  REGION 1..119: note = Description of Artificial Sequence: Synthetic polypeptide
  REGION 1..119: note = Synthetic Construct
QVQLQESGPGLVKPSQTLSLTCTVSGYTFSDYYIHWIRQPPGKGLEWIGYIYPNNGDNGYNPSLKSRVTISVDTSKNQFSLKLSSVTAADTAVYYCARRGYYGGSYDYWGQGTLVTVSS

SEQ ID NO: 1391 - protein, 113 aa, synthetic construct
  REGION 1..113: note = Description of Artificial Sequence: Synthetic polypeptide
  REGION 1..113: note = Synthetic Construct
WRIGQGKGSLKLARAARGFRFNTYAMTRVRQGPGKGREWEGVIRRKSSNFATLYADSVKDRFRASRDDSESMLYVQMSNWKQEDTAMYYGVRHKSNKYPFVYWGQGTLVTVSA

SEQ ID NO: 1392 - protein, 121 aa, synthetic construct
  REGION 1..121: note = Description of Artificial Sequence: Synthetic polypeptide
  REGION 1..121: note = Synthetic Construct
EVQLVESGGGLVKPGGSLRLSCAASGFRFNTYAMTWVRQAPGKGLEWEGVIRRKSSNFATLYAAPVKGRFTISRDDSKNTLYLQMNSLKTEDTAVYYCVRHKSNKYPFVYWGQGTLVTVSS

SEQ ID NO: 1393 - protein, 121 aa, synthetic construct
  REGION 1..121: note = Description of Artificial Sequence: Synthetic polypeptide
  REGION 1..121: note = Synthetic Construct
EVQLLESGGGLVQPGGSLRLSCAASGFRFNTYAMTWVRQAPGKGLEWEGVIRRKSSNFATLYADSVKGRFTISRDNSKNTLYLQMNSLRAEDTAVYYCVRHKSNKYPFVYWGQGTLVTVSS

SEQ ID NO: 1394 - protein, 121 aa, synthetic construct
  REGION 1..121: note = Description of Artificial Sequence: Synthetic polypeptide
  REGION 1..121: note = Synthetic Construct
EVQLVESGGGLVQPGGSLRLSCAASGFRFNTYAMTWVRQAPGKGLEWEGVIRRKSSNFATLYADSVKGRFTISRDNAKNSLYLQMNSLRAEDTAVYYCVRHKSNKYPFVYWGQGTLVTVSS

SEQ ID NO: 1395 - protein, 121 aa, synthetic construct
  REGION 1..121: note = Description of Artificial Sequence: Synthetic polypeptide
  REGION 1..121: note = Synthetic Construct
QVQLVESGGGVVQPGRSLRLSCAASGFRFNTYAMTWVRQAPGKGLEWEGVIRRKSSNFATLYADSVKGRFTISRDNSKNTLYLQMNSLRAEDTAVYYCVRHKSNKYPFVYWGQGTLVTVSS

SEQ ID NO: 1396 - protein, 121 aa, synthetic construct
  REGION 1..121: note = Description of Artificial Sequence: Synthetic polypeptide
  REGION 1..121: note = Synthetic Construct
QVQLVQSGAEVKKPGSSVKVSCKASGFRFNTYAMTWVRQAPGQGLEWEGVIRRKSSNFATLYAQKFQGRVTITADESTSTAYMELSSLRSEDTAVYYCVRHKSNKYPFVYWGQGTLVTVSS

SEQ ID NO: 1397 - protein, 121 aa, synthetic construct
  REGION 1..121: note = Description of Artificial Sequence: Synthetic polypeptide
  REGION 1..121: note = Synthetic Construct
QVQLVQSGAEVKKPGASVKVSCKASGFRFNTYAMTWVRQAPGQGLEWEGVIRRKSSNFATLYAQKFQGRVTMTRDTSTSTVYMELSSLRSEDTAVYYCVRHKSNKYPFVYWGQGTLVTVSS

SEQ ID NO: 1398 - protein, 121 aa, synthetic construct
  REGION 1..121: note = Description of Artificial Sequence: Synthetic polypeptide
  REGION 1..121: note = Synthetic Construct
EVQLVQSGAEVKKPGESLKISCKGSGFRFNTYAMTWVRQMPGKGLEWEGVIRRKSSNFATLYAPSFQGQVTISADKSISTAYLQWSSLKASDTAMYYCVRHKSNKYPFVYWGQGTLVTVSS

SEQ ID NO: 1399 - protein, 121 aa, synthetic construct
  REGION 1..121: note = Description of Artificial Sequence: Synthetic polypeptide
  REGION 1..121: note = Synthetic Construct
QVQLQESGPGLVKPSETLSLTCTVSGFRFNTYAMTWIRQPPGKGLEWEGVIRRKSSNFATLYAPSLKSRVTISVDTSKNQFSLKLSSVTAADTAVYYCVRHKSNKYPFVYWGQGTLVTVSS

SEQ ID NO: 1400 - protein, 121 aa, synthetic construct
  REGION 1..121: note = Description of Artificial Sequence: Synthetic polypeptide
  REGION 1..121: note = Synthetic Construct
QLQLQESGPGLVKPSETLSLTCTVSGFRFNTYAMTWIRQPPGKGLEWEGVIRRKSSNFATLYAPSLKSRVTISVDTSKNQFSLKLSSVTAADTAVYYCVRHKSNKYPFVYWGQGTLVTVSS

SEQ ID NO: 1401 - protein, 17 aa, synthetic construct
  REGION 1..17: note = Description of Artificial Sequence: Synthetic peptide
  REGION 1..17: note = Synthetic Construct
KSSQSVFYSSNQKNYLA

SEQ ID NO: 1402 - protein, 8 aa, synthetic construct
  REGION 1..8: note = Description of Artificial Sequence: Synthetic peptide
  REGION 1..8: note = Synthetic Construct
HQYLSSLT

SEQ ID NO: 1403 - protein, 9 aa, synthetic construct
  REGION 1..9: note = Description of Artificial Sequence: Synthetic peptide
  REGION 1..9: note = Synthetic Construct
SQSTHVPPT

SEQ ID NO: 1404 - protein, 9 aa, synthetic construct
  REGION 1..9: note = Description of Artificial Sequence: Synthetic peptide
  REGION 1..9: note = Synthetic Construct
YSFTGYYMH

SEQ ID NO: 1405 - protein, 16 aa, synthetic construct
  REGION 1..16: note = Description of Artificial Sequence: Synthetic peptide
  REGION 1..16: note = Synthetic Construct
VAEIRNKINNHATYYA

SEQ ID NO: 1406 - protein, 14 aa, synthetic construct
  REGION 1..14: note = Description of Artificial Sequence: Synthetic peptide
  REGION 1..14: note = Synthetic Construct
IGGINPNNGGTSYK

SEQ ID NO: 1407 - protein, 14 aa, synthetic construct
  REGION 1..14: note = Description of Artificial Sequence: Synthetic peptide
  REGION 1..14: note = Synthetic Construct
IGRVNPNNGGTSYN

SEQ ID NO: 1408 - protein, 13 aa, synthetic construct
  REGION 1..13: note = Description of Artificial Sequence: Synthetic peptide
  REGION 1..13: note = Synthetic Construct
TSLYDGSYLRFAY

SEQ ID NO: 1409 - protein, 9 aa, synthetic construct
  REGION 1..9: note = Description of Artificial Sequence: Synthetic peptide
  REGION 1..9: note = Synthetic Construct
VLTGGYFDY

SEQ ID NO: 1410 - protein, 20 aa, synthetic construct
  REGION 1..20: note = Description of Artificial Sequence: Synthetic peptide
  REGION 1..20: note = Synthetic Construct
QTQSPSSLAVSAGEKVTLSC

SEQ ID NO: 1411 - protein, 40 aa, synthetic construct
  REGION 1..40: note = Description of Artificial Sequence: Synthetic polypeptide
  REGION 1..40: note = Synthetic Construct
QTQVFLSLLLWVSGTCGNIMLTQSPSSLAVSAGEKVTLSC

SEQ ID NO: 1412 - protein, 23 aa, synthetic construct
  REGION 1..23: note = Description of Artificial Sequence: Synthetic peptide
  REGION 1..23: note = Synthetic Construct
DIVMSQSPSSLAVSVGEKVTMSC

SEQ ID NO: 1413 - protein, 15 aa, synthetic construct
  REGION 1..15: note = Description of Artificial Sequence: Synthetic peptide
  REGION 1..15: note = Synthetic Construct
WYQQKPGQSPKLLIS

SEQ ID NO: 1414 - protein, 32 aa, synthetic construct
  REGION 1..32: note = Description of Artificial Sequence: Synthetic polypeptide
  REGION 1..32: note = Synthetic Construct
GVPDRFTGSGFGTDFTLTISSVQGEDLAVYYC

SEQ ID NO: 1415 - protein, 32 aa, synthetic construct
  REGION 1..32: note = Description of Artificial Sequence: Synthetic polypeptide
  REGION 1..32: note = Synthetic Construct
GVPDRFTGSGSGTDFTLTINSVQAEDLAVYYC

SEQ ID NO: 1416 - protein, 30 aa, synthetic construct
  REGION 1..30: note = Description of Artificial Sequence: Synthetic polypeptide
  REGION 1..30: note = Synthetic Construct
GVQSEVKFEESGGGLVQPGGSMKLSCTASG

SEQ ID NO: 1417 - protein, 26 aa, synthetic construct
  REGION 1..26: note = Description of Artificial Sequence: Synthetic peptide
  REGION 1..26: note = Synthetic Construct
QVQLQQSGPELVKPGASVKISCKTSG

SEQ ID NO: 1418 - protein, 26 aa, synthetic construct
  REGION 1..26: note = Description of Artificial Sequence: Synthetic peptide
  REGION 1..26: note = Synthetic Construct
QVQLQQSGPDLVKPGASVKISCKASG

SEQ ID NO: 1419 - protein, 35 aa, synthetic construct
  REGION 1..35: note = Description of Artificial Sequence: Synthetic polypeptide
  REGION 1..35: note = Synthetic Construct
ESVKGRFTISRDDSKSSVSLQMNSLRTEDTGIYYC

SEQ ID NO: 1420 - protein, 35 aa, synthetic construct
  REGION 1..35: note = Description of Artificial Sequence: Synthetic polypeptide
  REGION 1..35: note = Synthetic Construct
QKFKGKATLTVDRSSSTAYMELRSLTSEDSAVYYC

SEQ ID NO: 1421 - protein, 35 aa, synthetic construct
  REGION 1..35: note = Description of Artificial Sequence: Synthetic polypeptide
  REGION 1..35: note = Synthetic Construct
QKFKGKAILTVDKSSSTAYMELRSLTSEDSAVYYC

SEQ ID NO: 1422 - protein, 129 aa, synthetic construct
  REGION 1..129: note = Description of Artificial Sequence: Synthetic polypeptide
  REGION 1..129: note = Synthetic Construct
QTQVFLSLLLWVSGTCGNIMLTQSPSSLAVSAGEKVTLSCKSSQSVFYSSNQKNYLAWYQQKPGQSPKLLISWASTRESGVPDRFTGSGSGTDFTLTINSVQAEDLAVYYCHQYLSSLTFGAGTKLELK

SEQ ID NO: 1423 - protein, 112 aa, synthetic construct
  REGION 1..112: note = Description of Artificial Sequence: Synthetic polypeptide
  REGION 1..112: note = Synthetic Construct
DIVMTQSPDSLAVSLGERATINCKSSQSVFYSSNQKNYLAWYQQKPGQPPKLLIYWASTRESGVPDRFSGSGSGTDFTLTISSLQAEDVAVYYCHQYLSSLTFGQGTKVEIK

SEQ ID NO: 1424 - protein, 112 aa, synthetic construct
  REGION 1..112: note = Description of Artificial Sequence: Synthetic polypeptide
  REGION 1..112: note = Synthetic Construct
DVVMTQSPLSLPVTLGQPASISCKSSQSVFYSSNQKNYLAWFQQRPGQSPRRLIYWASTRESGVPDRFSGSGSGTDFTLKISRVEAEDVGVYYCHQYLSSLTFGQGTKVEIK

SEQ ID NO: 1425 - protein, 112 aa, synthetic construct
  REGION 1..112: note = Description of Artificial Sequence: Synthetic polypeptide
  REGION 1..112: note = Synthetic Construct
DIVMTQSPLSLPVTPGEPASISCKSSQSVFYSSNQKNYLAWYLQKPGQSPQLLIYWASTRESGVPDRFSGSGSGTDFTLKISRVEAEDVGVYYCHQYLSSLTFGQGTKVEIK

SEQ ID NO: 1426 - protein, 112 aa, synthetic construct
  REGION 1..112: note = Description of Artificial Sequence: Synthetic polypeptide
  REGION 1..112: note = Synthetic Construct
DIQMTQSPSTLSASVGDRVTITCKSSQSVFYSSNQKNYLAWYQQKPGKAPKLLIYWASTRESGVPSRFSGSGSGTEFTLTISSLQPDDFATYYCHQYLSSLTFGQGTKVEIK

SEQ ID NO: 1427 - protein, 112 aa, synthetic construct
  REGION 1..112: note = Description of Artificial Sequence: Synthetic polypeptide
  REGION 1..112: note = Synthetic Construct
EIVMTQSPATLSVSPGERATLSCKSSQSVFYSSNQKNYLAWYQQKPGQAPRLLIYWASTRESGIPARFSGSGSGTEFTLTISSLQSEDFAVYYCHQYLSSLTFGQGTKVEIK

SEQ ID NO: 1428 - protein, 112 aa, synthetic construct
  REGION 1..112: note = Description of Artificial Sequence: Synthetic polypeptide
  REGION 1..112: note = Synthetic Construct
DIQLTQSPSFLSASVGDRVTITCKSSQSVFYSSNQKNYLAWYQQKPGKAPKLLIYWASTRESGVPSRFSGSGSGTEFTLTISSLQPEDFATYYCHQYLSSLTFGQGTKVEIK

SEQ ID NO: 1429 - protein, 112 aa, synthetic construct
  REGION 1..112: note = Description of Artificial Sequence: Synthetic polypeptide
  REGION 1..112: note = Synthetic Construct
EIVLTQSPATLSLSPGERATLSCKSSQSVFYSSNQKNYLAWYQQKPGQAPRLLIYWASTRESGIPARFSGSGSGTDFTLTISSLEPEDFAVYYCHQYLSSLTFGQGTKVEIK

SEQ ID NO: 1430 - protein, 112 aa, synthetic construct
  REGION 1..112: note = Description of Artificial Sequence: Synthetic polypeptide
  REGION 1..112: note = Synthetic Construct
DIQMTQSPSSLSASVGDRVTITCKSSQSVFYSSNQKNYLAWYQQKPGKAPKLLIYWASTRESGVPSRFSGSGSGTDFTLTISSLQPEDFATYYCHQYLSSLTFGQGTKVEIK

SEQ ID NO: 1431 - protein, 112 aa, synthetic construct
  REGION 1..112: note = Description of Artificial Sequence: Synthetic polypeptide
  REGION 1..112: note = Synthetic Construct
DIQMTQSPSSLSASVGDRVTITCKSSQSVFYSSNQKNYLAWYQQKPGKAPKLLIYWASTRESGVPSRFSGSGSGTDFTFTISSLQPEDIATYYCHQYLSSLTFGQGTKVEIK

SEQ ID NO: 1432 - protein, 112 aa, synthetic construct
  REGION 1..112: note = Description of Artificial Sequence: Synthetic polypeptide
  REGION 1..112: note = Synthetic Construct
EIVLTQSPGTLSLSPGERATLSCKSSQSVFYSSNQKNYLAWYQQKPGQAPRLLIYWASTRESGIPDRFSGSGSGTDFTLTISRLEPEDFAVYYCHQYLSSLTFGQGTKVEIK

SEQ ID NO: 1433 - protein, 113 aa, synthetic construct
  REGION 1..113: note = Description of Artificial Sequence: Synthetic polypeptide
  REGION 1..113: note = Synthetic Construct
DIVMSQSPSSLAVSVGEKVTMSCKSSQSLLYSSNQKNCLAWYQQKPGQSPKLLIYWASTRESGVPDRFTGSGSGTDFTLTISSVKAEDLAVYYCQQYYSYPLTFGAGTKLELK

SEQ ID NO: 1434 - protein, 113 aa, synthetic construct
  REGION 1..113: note = Description of Artificial Sequence: Synthetic polypeptide
  REGION 1..113: note = Synthetic Construct
DIVMTQSPDSLAVSLGERATINCKSSQSLLYSSNQKNCLAWYQQKPGQPPKLLIYWASTRESGVPDRFSGSGSGTDFTLTISSLQAEDVAVYYCQQYYSYPLTFGQGTKVEIK

SEQ ID NO: 1435 - protein, 113 aa, synthetic construct
  REGION 1..113: note = Description of Artificial Sequence: Synthetic polypeptide
  REGION 1..113: note = Synthetic Construct
DIVMTQSPLSLPVTPGEPASISCKSSQSLLYSSNQKNCLAWYLQKPGQSPQLLIYWASTRESGVPDRFSGSGSGTDFTLKISRVEAEDVGVYYCQQYYSYPLTFGQGTKVEIK

SEQ ID NO: 1436 - protein, 113 aa, synthetic construct
  REGION 1..113: note = Description of Artificial Sequence: Synthetic polypeptide
  REGION 1..113: note = Synthetic Construct
DVVMTQSPLSLPVTLGQPASISCKSSQSLLYSSNQKNCLAWFQQRPGQSPRRLIYWASTRESGVPDRFSGSGSGTDFTLKISRVEAEDVGVYYCQQYYSYPLTFGQGTKVEIK

SEQ ID NO: 1437 - protein, 113 aa, synthetic construct
  REGION 1..113: note = Description of Artificial Sequence: Synthetic polypeptide
  REGION 1..113: note = Synthetic Construct
DIQLTQSPSFLSASVGDRVTITCKSSQSLLYSSNQKNCLAWYQQKPGKAPKLLIYWASTRESGVPSRFSGSGSGTEFTLTISSLQPEDFATYYCQQYYSYPLTFGQGTKVEIK

SEQ ID NO: 1438 - protein, 113 aa, synthetic construct
  REGION 1..113: note = Description of Artificial Sequence: Synthetic polypeptide
  REGION 1..113: note = Synthetic Construct
EIVMTQSPATLSVSPGERATLSCKSSQSLLYSSNQKNCLAWYQQKPGQAPRLLIYWASTRESGIPARFSGSGSGTEFTLTISSLQSEDFAVYYCQQYYSYPLTFGQGTKVEIK

SEQ ID NO: 1439 - protein, 113 aa, synthetic construct
  REGION 1..113: note = Description of Artificial Sequence: Synthetic polypeptide
  REGION 1..113: note = Synthetic Construct
DIQMTQSPSTLSASVGDRVTITCKSSQSLLYSSNQKNCLAWYQQKPGKAPKLLIYWASTRESGVPSRFSGSGSGTEFTLTISSLQPDDFATYYCQQYYSYPLTFGQGTKVEIK

SEQ ID NO: 1440 - protein, 113 aa, synthetic construct
  REGION 1..113: note = Description of Artificial Sequence: Synthetic polypeptide
  REGION 1..113: note = Synthetic Construct
DIQMTQSPSSLSASVGDRVTITCKSSQSLLYSSNQKNCLAWYQQKPGKAPKLLIYWASTRESGVPSRFSGSGSGTDFTFTISSLQPEDIATYYCQQYYSYPLTFGQGTKVEIK

SEQ ID NO: 1441 - protein, 113 aa, synthetic construct
  REGION 1..113: note = Description of Artificial Sequence: Synthetic polypeptide
  REGION 1..113: note = Synthetic Construct
DIQMTQSPSSLSASVGDRVTITCKSSQSLLYSSNQKNCLAWYQQKPGKAPKLLIYWASTRESGVPSRFSGSGSGTDFTLTISSLQPEDFATYYCQQYYSYPLTFGQGTKVEIK

SEQ ID NO: 1442 - protein, 113 aa, synthetic construct
  REGION 1..113: note = Description of Artificial Sequence: Synthetic polypeptide
  REGION 1..113: note = Synthetic Construct
EIVLTQSPATLSLSPGERATLSCKSSQSLLYSSNQKNCLAWYQQKPGQAPRLLIYWASTRESGIPARFSGSGSGTDFTLTISSLEPEDFAVYYCQQYYSYPLTFGQGTKVEIK

SEQ ID NO: 1443 - protein, 113 aa, synthetic construct
  REGION 1..113: note = Description of Artificial Sequence: Synthetic polypeptide
  REGION 1..113: note = Synthetic Construct
EIVLTQSPGTLSLSPGERATLSCKSSQSLLYSSNQKNCLAWYQQKPGQAPRLLIYWASTRESGIPDRFSGSGSGTDFTLTISRLEPEDFAVYYCQQYYSYPLTFGQGTKVEIK

SEQ ID NO: 1444 - protein, 112 aa, synthetic construct
  REGION 1..112: note = Description of Artificial Sequence: Synthetic polypeptide
  REGION 1..112: note = Synthetic Construct
DVVMTQTPLSLPVSLGDQASISCRSSQSLVHSNGNTYLHWYLQKPGQSPKLLIYKVSNRFSGVPDRFSGSGSGTDFTLKISRVEAEDLGVYFCSQSTHVPPTFGSGTKLEIK

SEQ ID NO: 1445 - protein, 112 aa, synthetic construct
  REGION 1..112: note = Description of Artificial Sequence: Synthetic polypeptide
  REGION 1..112: note = Synthetic Construct
DVVMTQSPLSLPVTLGQPASISCRSSQSLVHSNGNTYLHWFQQRPGQSPRRLIYKVSNRFSGVPDRFSGSGSGTDFTLKISRVEAEDVGVYYCSQSTHVPPTFGQGTKVEIK

SEQ ID NO: 1446 - protein, 112 aa, synthetic construct
  REGION 1..112: note = Description of Artificial Sequence: Synthetic polypeptide
  REGION 1..112: note = Synthetic Construct
DIVMTQSPLSLPVTPGEPASISCRSSQSLVHSNGNTYLHWYLQKPGQSPQLLIYKVSNRFSGVPDRFSGSGSGTDFTLKISRVEAEDVGVYYCSQSTHVPPTFGQGTKVEIK

SEQ ID NO: 1447 - protein, 112 aa, synthetic construct
  REGION 1..112: note = Description of Artificial Sequence: Synthetic polypeptide
  REGION 1..112: note = Synthetic Construct
DIVMTQSPDSLAVSLGERATINCRSSQSLVHSNGNTYLHWYQQKPGQPPKLLIYKVSNRFSGVPDRFSGSGSGTDFTLTISSLQAEDVAVYYCSQSTHVPPTFGQGTKVEIK

SEQ ID NO: 1448 - protein, 112 aa, synthetic construct
  REGION 1..112: note = Description of Artificial Sequence: Synthetic polypeptide
  REGION 1..112: note = Synthetic Construct
EIVLTQSPATLSLSPGERATLSCRSSQSLVHSNGNTYLHWYQQKPGQAPRLLIYKVSNRFSGIPARFSGSGSGTDFTLTISSLEPEDFAVYYCSQSTHVPPTFGQGTKVEIK

SEQ ID NO: 1449 - protein, 112 aa, synthetic construct
  REGION 1..112: note = Description of Artificial Sequence: Synthetic polypeptide
  REGION 1..112: note = Synthetic Construct
DIQMTQSPSSLSASVGDRVTITCRSSQSLVHSNGNTYLHWYQQKPGKAPKLLIYKVSNRFSGVPSRFSGSGSGTDFTFTISSLQPEDIATYYCSQSTHVPPTFGQGTKVEIK

SEQ ID NO: 1450 - protein, 112 aa, synthetic construct
  REGION 1..112: note = Description of Artificial Sequence: Synthetic polypeptide
  REGION 1..112: note = Synthetic Construct
DIQMTQSPSTLSASVGDRVTITCRSSQSLVHSNGNTYLHWYQQKPGKAPKLLIYKVSNRFSGVPSRFSGSGSGTEFTLTISSLQPDDFATYYCSQSTHVPPTFGQGTKVEIK

SEQ ID NO: 1451 - protein, 112 aa, synthetic construct
  REGION 1..112: note = Description of Artificial Sequence: Synthetic polypeptide
  REGION 1..112: note = Synthetic Construct
DIQMTQSPSSLSASVGDRVTITCRSSQSLVHSNGNTYLHWYQQKPGKAPKLLIYKVSNRFSGVPSRFSGSGSGTDFTLTISSLQPEDFATYYCSQSTHVPPTFGQGTKVEIK

SEQ ID NO: 1452 - protein, 112 aa, synthetic construct
  REGION 1..112: note = Description of Artificial Sequence: Synthetic polypeptide
  REGION 1..112: note = Synthetic Construct
DIQLTQSPSFLSASVGDRVTITCRSSQSLVHSNGNTYLHWYQQKPGKAPKLLIYKVSNRFSGVPSRFSGSGSGTEFTLTISSLQPEDFATYYCSQSTHVPPTFGQGTKVEIK

SEQ ID NO: 1453 - protein, 112 aa, synthetic construct
  REGION 1..112: note = Description of Artificial Sequence: Synthetic polypeptide
  REGION 1..112: note = Synthetic Construct
EIVMTQSPATLSVSPGERATLSCRSSQSLVHSNGNTYLHWYQQKPGQAPRLLIYKVSNRFSGIPARFSGSGSGTEFTLTISSLQSEDFAVYYCSQSTHVPPTFGQGTKVEIK

SEQ ID NO: 1454 - protein, 112 aa, synthetic construct
  REGION 1..112: note = Description of Artificial Sequence: Synthetic polypeptide
  REGION 1..112: note = Synthetic Construct
EIVLTQSPGTLSLSPGERATLSCRSSQSLVHSNGNTYLHWYQQKPGQAPRLLIYKVSNRFSGIPDRFSGSGSGTDFTLTISRLEPEDFAVYYCSQSTHVPPTFGQGTKVEIK

SEQ ID NO: 1455 - protein, 117 aa, synthetic construct; identical to SEQ ID NO: 1175
  REGION 1..117: note = Description of Artificial Sequence: Synthetic polypeptide
  REGION 1..117: note = Synthetic Construct

SEQ ID NO: 1456 - protein, 121 aa, synthetic construct
  REGION 1..121: note = Description of Artificial Sequence: Synthetic polypeptide
  REGION 1..121: note = Synthetic Construct
EVQLVESGGGLVKPGGSLRLSCAASGFNFNTYAMKWVRQAPGKGLEWIARIRSNSNDYATNYSAPVKGRFTISRDDSKNTLYLQMNSLKTEDTAVYYCVGHKINNYPFAHWGQGTLVTVSS

SEQ ID NO: 1457 - protein, 121 aa, synthetic construct
  REGION 1..121: note = Description of Artificial Sequence: Synthetic polypeptide
  REGION 1..121: note = Synthetic Construct
EVQLLESGGGLVQPGGSLRLSCAASGFNFNTYAMKWVRQAPGKGLEWIARIRSNSNDYATNYSDSVKGRFTISRDNSKNTLYLQMNSLRAEDTAVYYCVGHKINNYPFAHWGQGTLVTVSS

SEQ ID NO: 1458 - protein, 121 aa, synthetic construct
  REGION 1..121: note = Description of Artificial Sequence: Synthetic polypeptide
  REGION 1..121: note = Synthetic Construct
QVQLVESGGGVVQPGRSLRLSCAASGFNFNTYAMKWVRQAPGKGLEWIARIRSNSNDYATNYSDSVKGRFTISRDNSKNTLYLQMNSLRAEDTAVYYCVGHKINNYPFAHWGQGTLVTVSS

SEQ ID NO: 1459 - protein, 121 aa, synthetic construct
  REGION 1..121: note = Description of Artificial Sequence: Synthetic polypeptide
  REGION 1..121: note = Synthetic Construct
EVQLVESGGGLVQPGGSLRLSCAASGFNFNTYAMKWVRQAPGKGLEWIARIRSNSNDYATNYSDSVKGRFTISRDNAKNSLYLQMNSLRAEDTAVYYCVGHKINNYPFAHWGQGTLVTVSS

SEQ ID NO: 1460 - protein, 121 aa, synthetic construct; identical to SEQ ID NO: 1459
  REGION 1..121: note = Description of Artificial Sequence: Synthetic polypeptide
  REGION 1..121: note = Synthetic Construct

SEQ ID NO: 1461 - protein, 121 aa, synthetic construct
  REGION 1..121: note = Description of Artificial Sequence: Synthetic polypeptide
  REGION 1..121: note = Synthetic Construct
QVQLVQSGAEVKKPGSSVKVSCKASGFNFNTYAMKWVRQAPGQGLEWIARIRSNSNDYATNYSQKFQGRVTITADESTSTAYMELSSLRSEDTAVYYCVGHKINNYPFAHWGQGTLVTVSS

SEQ ID NO: 1462 - protein, 121 aa, synthetic construct
  REGION 1..121: note = Description of Artificial Sequence: Synthetic polypeptide
  REGION 1..121: note = Synthetic Construct
QVQLVQSGAEVKKPGASVKVSCKASGFNFNTYAMKWVRQAPGQGLEWIARIRSNSNDYATNYSQKFQGRVTMTRDTSTSTVYMELSSLRSEDTAVYYCVGHKINNYPFAHWGQGTLVTVSS

SEQ ID NO: 1463 - protein, 121 aa, synthetic construct
  REGION 1..121: note = Description of Artificial Sequence: Synthetic polypeptide
  REGION 1..121: note = Synthetic Construct
EVQLVQSGAEVKKPGESLKISCKGSGFNFNTYAMKWVRQMPGKGLEWIARIRSNSNDYATNYSPSFQGQVTISADKSISTAYLQWSSLKASDTAMYYCVGHKINNYPFAHWGQGTLVTVSS

SEQ ID NO: 1464 - protein, 121 aa, synthetic construct
  REGION 1..121: note = Description of Artificial Sequence: Synthetic polypeptide
  REGION 1..121: note = Synthetic Construct
QVQLQESGPGLVKPSETLSLTCTVSGFNFNTYAMKWIRQPPGKGLEWIARIRSNSNDYATNYSPSLKSRVTISVDTSKNQFSLKLSSVTAADTAVYYCVGHKINNYPFAHWGQGTLVTVSS

SEQ ID NO: 1465 - protein, 121 aa, synthetic construct
  REGION 1..121: note = Description of Artificial Sequence: Synthetic polypeptide
  REGION 1..121: note = Synthetic Construct
QVQLQESGPGLVKPSQTLSLTCTVSGFNFNTYAMKWIRQPPGKGLEWIARIRSNSNDYATNYSPSLKSRVTISVDTSKNQFSLKLSSVTAADTAVYYCVGHKINNYPFAHWGQGTLVTVSS

SEQ ID NO: 1466 - protein, 126 aa, synthetic construct
  REGION 1..126: note = Description of Artificial Sequence: Synthetic polypeptide
  REGION 1..126: note = Synthetic Construct
GVQSEVKFEESGGGLVQPGGSMKLSCTASGFTFSDAWMDWVRQSPEKGLEWVAEIRNKINNHATYYAESVKGRFTISRDDSKSSVSLQMNSLRTEDTGIYYCTSLYDGSYLRFAYWGQGTLVTVSA

SEQ ID NO: 1467 - protein, 122 aa, synthetic construct
  REGION 1..122: note = Description of Artificial Sequence: Synthetic polypeptide
  REGION 1..122: note = Synthetic Construct
EVQLVESGGGLVKPGGSLRLSCAASGFTFSDAWMDWVRQAPGKGLEWVAEIRNKINNHATYYAAPVKGRFTISRDDSKNTLYLQMNSLKTEDTAVYYCTSLYDGSYLRFAYWGQGTLVTVSS

SEQ ID NO: 1468 - protein, 122 aa, synthetic construct
  REGION 1..122: note = Description of Artificial Sequence: Synthetic polypeptide
  REGION 1..122: note = Synthetic Construct
EVQLVESGGGLVQPGGSLRLSCAASGFTFSDAWMDWVRQAPGKGLEWVAEIRNKINNHATYYADSVKGRFTISRDNAKNSLYLQMNSLRAEDTAVYYCTSLYDGSYLRFAYWGQGTLVTVSS

SEQ ID NO: 1469 - protein, 122 aa, synthetic construct
  REGION 1..122: note = Description of Artificial Sequence: Synthetic polypeptide
  REGION 1..122: note = Synthetic Construct
EVQLLESGGGLVQPGGSLRLSCAASGFTFSDAWMDWVRQAPGKGLEWVAEIRNKINNHATYYADSVKGRFTISRDNSKNTLYLQMNSLRAEDTAVYYCTSLYDGSYLRFAYWGQGTLVTVSS

SEQ ID NO: 1470 - protein, 122 aa, synthetic construct
  REGION 1..122: note = Description of Artificial Sequence: Synthetic polypeptide
  REGION 1..122: note = Synthetic Construct
QVQLVESGGGVVQPGRSLRLSCAASGFTFSDAWMDWVRQAPGKGLEWVAEIRNKINNHATYYADSVKGRFTISRDNSKNTLYLQMNSLRAEDTAVYYCTSLYDGSYLRFAYWGQGTLVTVSS

SEQ ID NO: 1471 - protein, 122 aa, synthetic construct; identical to SEQ ID NO: 1468
  REGION 1..122: note = Description of Artificial Sequence: Synthetic polypeptide
  REGION 1..122: note = Synthetic Construct

SEQ ID NO: 1472 - protein, 122 aa, synthetic construct
  REGION 1..122: note = Description of Artificial Sequence: Synthetic polypeptide
  REGION 1..122: note = Synthetic Construct
QVQLVQSGAEVKKPGSSVKVSCKASGFTFSDAWMDWVRQAPGQGLEWVAEIRNKINNHATYYAQKFQGRVTITADESTSTAYMELSSLRSEDTAVYYCTSLYDGSYLRFAYWGQGTLVTVSS

SEQ ID NO: 1473 - protein, 122 aa, synthetic construct
  REGION 1..122: note = Description of Artificial Sequence: Synthetic polypeptide
  REGION 1..122: note = Synthetic Construct
QVQLVQSGAEVKKPGASVKVSCKASGFTFSDAWMDWVRQAPGQGLEWVAEIRNKINNHATYYAQKFQGRVTMTRDTSTSTVYMELSSLRSEDTAVYYCTSLYDGSYLRFAYWGQGTLVTVSS

SEQ ID NO: 1474 - protein, 122 aa, synthetic construct
  REGION 1..122: note = Description of Artificial Sequence: Synthetic polypeptide
  REGION 1..122: note = Synthetic Construct
EVQLVQSGAEVKKPGESLKISCKGSGFTFSDAWMDWVRQMPGKGLEWVAEIRNKINNHATYYAPSFQGQVTISADKSISTAYLQWSSLKASDTAMYYCTSLYDGSYLRFAYWGQGTLVTVSS

SEQ ID NO: 1475 - protein, 122 aa, synthetic construct
  REGION 1..122: note = Description of Artificial Sequence: Synthetic polypeptide
  REGION 1..122: note = Synthetic Construct
QVQLQESGPGLVKPSETLSLTCTVSGFTFSDAWMDWIRQPPGKGLEWVAEIRNKINNHATYYAPSLKSRVTISVDTSKNQFSLKLSSVTAADTAVYYCTSLYDGSYLRFAYWGQGTLVTVSS

SEQ ID NO: 1476 - protein, 122 aa, synthetic construct
  REGION 1..122: note = Description of Artificial Sequence: Synthetic polypeptide
  REGION 1..122: note = Synthetic Construct
QVQLQESGPGLVKPSQTLSLTCTVSGFTFSDAWMDWIRQPPGKGLEWVAEIRNKINNHATYYAPSLKSRVTISVDTSKNQFSLKLSSVTAADTAVYYCTSLYDGSYLRFAYWGQGTLVTVSS

SEQ ID NO: 1477 - protein, 119 aa, synthetic construct
  REGION 1..119: note = Description of Artificial Sequence: Synthetic polypeptide
  REGION 1..119: note = Synthetic Construct
QVQLQQSGPELVKPGASVKISCKTSGYTFTEYTMHWVKQSHGKSLEWIGGINPNNGGTSYKQKFKGKATLTVDRSSSTAYMELRSLTSEDSAVYYCARGGSHYYAMDYWGQGTSVTVSS

SEQ ID NO: 1478 - protein, 119 aa, synthetic construct
  REGION 1..119: note = Description of Artificial Sequence: Synthetic polypeptide
  REGION 1..119: note = Synthetic Construct
QVQLVQSGAEVKKPGASVKVSCKASGYTFTEYTMHWVRQAPGQGLEWIGGINPNNGGTSYKQKFQGRVTMTRDTSTSTVYMELSSLRSEDTAVYYCARGGSHYYAMDYWGQGTLVTVSS

SEQ ID NO: 1479 - protein, 119 aa, synthetic construct
  REGION 1..119: note = Description of Artificial Sequence: Synthetic polypeptide
  REGION 1..119: note = Synthetic Construct
QVQLVQSGAEVKKPGSSVKVSCKASGYTFTEYTMHWVRQAPGQGLEWIGGINPNNGGTSYKQKFQGRVTITADESTSTAYMELSSLRSEDTAVYYCARGGSHYYAMDYWGQGTLVTVSS

SEQ ID NO: 1480 - protein, 119 aa, synthetic construct
  REGION 1..119: note = Description of Artificial Sequence: Synthetic polypeptide
  REGION 1..119: note = Synthetic Construct
EVQLVQSGAEVKKPGESLKISCKGSGYTFTEYTMHWVRQMPGKGLEWIGGINPNNGGTSYKPSFQGQVTISADKSISTAYLQWSSLKASDTAMYYCARGGSHYYAMDYWGQGTLVTVSS

SEQ ID NO: 1481 - protein, 119 aa, synthetic construct
  REGION 1..119: note = Description of Artificial Sequence: Synthetic polypeptide
  REGION 1..119: note = Synthetic Construct
EVQLLESGGGLVQPGGSLRLSCAASGYTFTEYTMHWVRQAPGKGLEWIGGINPNNGGTSYKDSVKGRFTISRDNSKNTLYLQMNSLRAEDTAVYYCARGGSHYYAMDYWGQGTLVTVSS

SEQ ID NO: 1482 - protein, 119 aa, synthetic construct
  REGION 1..119: note = Description of Artificial Sequence: Synthetic polypeptide
  REGION 1..119: note = Synthetic Construct
QVQLVESGGGVVQPGRSLRLSCAASGYTFTEYTMHWVRQAPGKGLEWIGGINPNNGGTSYKDSVKGRFTISRDNSKNTLYLQMNSLRAEDTAVYYCARGGSHYYAMDYWGQGTLVTVSS

SEQ ID NO: 1483 - protein, 119 aa, synthetic construct
  REGION 1..119: note = Description of Artificial Sequence: Synthetic polypeptide
  REGION 1..119: note = Synthetic Construct
EVQLVESGGGLVQPGGSLRLSCAASGYTFTEYTMHWVRQAPGKGLEWIGGINPNNGGTSYKDSVKGRFTISRDNAKNSLYLQMNSLRAEDTAVYYCARGGSHYYAMDYWGQGTLVTVSS

SEQ ID NO: 1484 - protein, 119 aa, synthetic construct; identical to SEQ ID NO: 1483
  REGION 1..119: note = Description of Artificial Sequence: Synthetic polypeptide
  REGION 1..119: note = Synthetic Construct

SEQ ID NO: 1485 - protein, 119 aa, synthetic construct
  REGION 1..119: note = Description of Artificial Sequence: Synthetic polypeptide
  REGION 1..119: note = Synthetic Construct
QVQLQESGPGLVKPSETLSLTCTVSGYTFTEYTMHWIRQPPGKGLEWIGGINPNNGGTSYKPSLKSRVTISVDTSKNQFSLKLSSVTAADTAVYYCARGGSHYYAMDYWGQGTLVTVSS

SEQ ID NO: 1486 - protein, 119 aa, synthetic construct
  REGION 1..119: note = Description of Artificial Sequence: Synthetic polypeptide
  REGION 1..119: note = Synthetic Construct
EVQLVESGGGLVKPGGSLRLSCAASGYTFTEYTMHWVRQAPGKGLEWIGGINPNNGGTSYKAPVKGRFTISRDDSKNTLYLQMNSLKTEDTAVYYCARGGSHYYAMDYWGQGTLVTVSS

SEQ ID NO: 1487 - protein, 119 aa, synthetic construct
  REGION 1..119: note = Description of Artificial Sequence: Synthetic polypeptide
  REGION 1..119: note = Synthetic Construct
QLQLQESGPGLVKPSETLSLTCTVSGYTFTEYTMHWIRQPPGKGLEWIGGINPNNGGTSYKPSLKSRVTISVDTSKNQFSLKLSSVTAADTAVYYCARGGSHYYAMDYWGQGTLVTVSS

SEQ ID NO: 1488 - protein, 116 aa, synthetic construct
  REGION 1..116: note = Description of Artificial Sequence: Synthetic polypeptide
  REGION 1..116: note = Synthetic Construct
QVQLQQSGPDLVKPGASVKISCKASGYSFTGYYMHWVKQSHGKSLEWIGRVNPNNGGTSYNQKFKGKAILTVDKSSSTAYMELRSLTSEDSAVYYCVLTGGYFDYWGQGTTLTVSS

SEQ ID NO: 1489 - protein, 116 aa, synthetic construct
  REGION 1..116: note = Description of Artificial Sequence: Synthetic polypeptide
  REGION 1..116: note = Synthetic Construct
QVQLVQSGAEVKKPGASVKVSCKASGYSFTGYYMHWVRQAPGQGLEWIGRVNPNNGGTSYNQKFQGRVTMTRDTSTSTVYMELSSLRSEDTAVYYCVLTGGYFDYWGQGTLVTVSS

SEQ ID NO: 1490 - protein, 116 aa, synthetic construct
  REGION 1..116: note = Description of Artificial Sequence: Synthetic polypeptide
  REGION 1..116: note = Synthetic Construct
EVQLVQSGAEVKKPGESLKISCKGSGYSFTGYYMHWVRQMPGKGLEWIGRVNPNNGGTSYNPSFQGQVTISADKSISTAYLQWSSLKASDTAMYYCVLTGGYFDYWGQGTLVTVSS

SEQ ID NO: 1491 - protein, 116 aa, synthetic construct
  REGION 1..116: note = Description of Artificial Sequence: Synthetic polypeptide
  REGION 1..116: note = Synthetic Construct
EVQLLESGGGLVQPGGSLRLSCAASGYSFTGYYMHWVRQAPGKGLEWIGRVNPNNGGTSYNDSVKGRFTISRDNSKNTLYLQMNSLRAEDTAVYYCVLTGGYFDYWGQGTLVTVSS

SEQ ID NO: 1492 - protein, 116 aa, synthetic construct
  REGION 1..116: note = Description of Artificial Sequence: Synthetic polypeptide
  REGION 1..116: note = Synthetic Construct
QVQLVQSGAEVKKPGSSVKVSCKASGYSFTGYYMHWVRQAPGQGLEWIGRVNPNNGGTSYNQKFQGRVTITADESTSTAYMELSSLRSEDTAVYYCVLTGGYFDYWGQGTLVTVSS

SEQ ID NO: 1493 - protein, 116 aa, synthetic construct
  REGION 1..116: note = Description of Artificial Sequence: Synthetic polypeptide
  REGION 1..116: note = Synthetic Construct
QVQLVESGGGVVQPGRSLRLSCAASGYSFTGYYMHWVRQAPGKGLEWIGRVNPNNGGTSYNDSVKGRFTISRDNSKNTLYLQMNSLRAEDTAVYYCVLTGGYFDYWGQGTLVTVSS

SEQ ID NO: 1494 - protein, 116 aa, synthetic construct
  REGION 1..116: note = Description of Artificial Sequence: Synthetic polypeptide
  REGION 1..116: note = Synthetic Construct
EVQLVESGGGLVQPGGSLRLSCAASGYSFTGYYMHWVRQAPGKGLEWIGRVNPNNGGTSYNDSVKGRFTISRDNAKNSLYLQMNSLRAEDTAVYYCVLTGGYFDYWGQGTLVTVSS

SEQ ID NO: 1495 - protein, 116 aa, synthetic construct; identical to SEQ ID NO: 1494
  REGION 1..116: note = Description of Artificial Sequence: Synthetic polypeptide
  REGION 1..116: note = Synthetic Construct

SEQ ID NO: 1496 - protein, 116 aa, synthetic construct
  REGION 1..116: note = Description of Artificial Sequence: Synthetic polypeptide
  REGION 1..116: note = Synthetic Construct
QVQLQESGPGLVKPSETLSLTCTVSGYSFTGYYMHWIRQPPGKGLEWIGRVNPNNGGTSYNPSLKSRVTISVDTSKNQFSLKLSSVTAADTAVYYCVLTGGYFDYWGQGTLVTVSS

SEQ ID NO: 1497 - protein, 116 aa, synthetic construct
  REGION 1..116: note = Description of Artificial Sequence: Synthetic polypeptide
  REGION 1..116: note = Synthetic Construct
EVQLVESGGGLVKPGGSLRLSCAASGYSFTGYYMHWVRQAPGKGLEWIGRVNPNNGGTSYNAPVKGRFTISRDDSKNTLYLQMNSLKTEDTAVYYCVLTGGYFDYWGQGTLVTVSS

SEQ ID NO: 1498 - protein, 116 aa, synthetic construct
  REGION 1..116: note = Description of Artificial Sequence: Synthetic polypeptide
  REGION 1..116: note = Synthetic Construct
QLQLQESGPGLVKPSETLSLTCTVSGYSFTGYYMHWIRQPPGKGLEWIGRVNPNNGGTSYNPSLKSRVTISVDTSKNQFSLKLSSVTAADTAVYYCVLTGGYFDYWGQGTLVTVSS

SEQ ID NO: 1499 - protein, 109 aa, synthetic construct
  REGION 1..109: note = Description of Artificial Sequence: Synthetic polypeptide
  REGION 1..109: note = Synthetic Construct
QTQSPSSLAVSAGEKVTLSCKSSQSVFYSSNQKNYLAWYQQKPGQSPKLLISWASTRESGVPDRFTGSGFGTDFTLTISSVQGEDLAVYYCHQYLSSLTFGAGTKLELK

SEQ ID NO: 1500 - protein, 112 aa, synthetic construct; identical to SEQ ID NO: 1423
  REGION 1..112: note = Description of Artificial Sequence: Synthetic polypeptide
  REGION 1..112: note = Synthetic Construct

SEQ ID NO: 1501 - protein, 112 aa, synthetic construct; identical to SEQ ID NO: 1425
  REGION 1..112: note = Description of Artificial Sequence: Synthetic polypeptide
  REGION 1..112: note = Synthetic Construct

SEQ ID NO: 1502 - protein, 112 aa, synthetic construct; identical to SEQ ID NO: 1424
  REGION 1..112: note = Description of Artificial Sequence: Synthetic polypeptide
  REGION 1..112: note = Synthetic Construct

SEQ ID NO: 1503 - protein, 112 aa, synthetic construct; identical to SEQ ID NO: 1426
  REGION 1..112: note = Description of Artificial Sequence: Synthetic polypeptide
  REGION 1..112: note = Synthetic Construct

SEQ ID NO: 1504 - protein, 112 aa, synthetic construct; identical to SEQ ID NO: 1428
  REGION 1..112: note = Description of Artificial Sequence: Synthetic polypeptide
  REGION 1..112: note = Synthetic Construct

SEQ ID NO: 1505 - protein, 112 aa, synthetic construct; identical to SEQ ID NO: 1427
  REGION 1..112: note = Description of Artificial Sequence: Synthetic polypeptide
  REGION 1..112: note = Synthetic Construct

SEQ ID NO: 1506 - protein, 112 aa, synthetic construct; identical to SEQ ID NO: 1431
  REGION 1..112: note = Description of Artificial Sequence: Synthetic polypeptide
  REGION 1..112: note = Synthetic Construct

SEQ ID NO: 1507 - protein, 112 aa, synthetic construct; identical to SEQ ID NO: 1429
  REGION 1..112: note = Description of Artificial Sequence: Synthetic polypeptide
  REGION 1..112: note = Synthetic Construct

SEQ ID NO: 1508 - protein, 112 aa, synthetic construct; identical to SEQ ID NO: 1430
  REGION 1..112: note = Description of Artificial Sequence: Synthetic polypeptide
  REGION 1..112: note = Synthetic Construct

SEQ ID NO: 1509 - protein, 112 aa, synthetic construct; identical to SEQ ID NO: 1432
  REGION 1..112: note = Description of Artificial Sequence: Synthetic polypeptide
  REGION 1..112: note = Synthetic Construct

SEQ ID NO: 1510 - protein, 9 aa, synthetic construct
  REGION 1..9: note = Description of Artificial Sequence: Synthetic peptide
  REGION 1..9: note = Synthetic Construct
SQDVSTTVA

SEQ ID NO: 1511 - protein, 14 aa, synthetic construct
  REGION 1..14: note = Description of Artificial Sequence: Synthetic peptide
  REGION 1..14: note = Synthetic Construct
SQSIVHSNGNTYLE

SEQ ID NO: 1512 - protein, 9 aa, synthetic construct
  REGION 1..9: note = Description of Artificial Sequence: Synthetic peptide
  REGION 1..9: note = Synthetic Construct
SQGVSTAVA

SEQ ID NO: 1513 - protein, 9 aa, synthetic construct
  REGION 1..9: note = Description of Artificial Sequence: Synthetic peptide
  REGION 1..9: note = Synthetic Construct
SQDVRTAVA

SEQ ID NO: 1514 - protein, 9 aa, synthetic construct
  REGION 1..9: note = Description of Artificial Sequence: Synthetic peptide
  REGION 1..9: note = Synthetic Construct
SENVVTYVS

SEQ ID NO: 1515 - protein, 7 aa, synthetic construct
  REGION 1..7: note = Description of Artificial Sequence: Synthetic peptide
  REGION 1..7: note = Synthetic Construct
SASYRYT

SEQ ID NO: 1516 - protein, 7 aa, synthetic construct
  REGION 1..7: note = Description of Artificial Sequence: Synthetic peptide
  REGION 1..7: note = Synthetic Construct
WASTRHT

SEQ ID NO: 1517 - protein, 7 aa, synthetic construct
  REGION 1..7: note = Description of Artificial Sequence: Synthetic peptide
  REGION 1..7: note = Synthetic Construct
GASNRYT

SEQ ID NO: 1518 - protein, 9 aa, synthetic construct
  REGION 1..9: note = Description of Artificial Sequence: Synthetic peptide
  REGION 1..9: note = Synthetic Construct
QQHYSTPPT

SEQ ID NO: 1519 - protein, 9 aa, synthetic construct
  REGION 1..9: note = Description of Artificial Sequence: Synthetic peptide
  REGION 1..9: note = Synthetic Construct
FQGSHVPFT

SEQ ID NO: 1520 - protein, 8 aa, synthetic construct
  REGION 1..8: note = Description of Artificial Sequence: Synthetic peptide
  REGION 1..8: note = Synthetic Construct
HQHYSTYT

SEQ ID NO: 1521 - protein, 10 aa, synthetic construct
  REGION 1..10: note = Description of Artificial Sequence: Synthetic peptide
  REGION 1..10: note = Synthetic Construct
QQHYGTPPWT

SEQ ID NO: 1522 - protein, 9 aa, synthetic construct
  REGION 1..9: note = Description of Artificial Sequence: Synthetic peptide
  REGION 1..9: note = Synthetic Construct
GQGYSYPYT

SEQ ID NO: 1523 - protein, 11 aa, synthetic construct
  REGION 1..11: note = Description of Artificial Sequence: Synthetic peptide
  REGION 1..11: note = Synthetic Construct
SRFTFSSYAMS

SEQ ID NO: 1524 - protein, 11 aa, synthetic construct
  REGION 1..11: note = Description of Artificial Sequence: Synthetic peptide
  REGION 1..11: note = Synthetic Construct
SAFSLTNYAVH

SEQ ID NO: 1525 - protein, 11 aa, synthetic construct
  REGION 1..11: note = Description of Artificial Sequence: Synthetic peptide
  REGION 1..11: note = Synthetic Construct
SRFTFSSYAVS

SEQ ID NO: 1526 - protein, 14 aa, synthetic construct
  REGION 1..14: note = Description of Artificial Sequence: Synthetic peptide
  REGION 1..14: note = Synthetic Construct
VAAISGGGRYTYYP

SEQ ID NO: 1527 - protein, 13 aa, synthetic construct
  REGION 1..13: note = Description of Artificial Sequence: Synthetic peptide
  REGION 1..13: note = Synthetic Construct
LGVIWSGGSTAFN

SEQ ID NO: 1528 - protein, 14 aa, synthetic construct
  REGION 1..14: note = Description of Artificial Sequence: Synthetic peptide
  REGION 1..14: note = Synthetic Construct
VATISGGGRYTYYP

SEQ ID NO: 1529 - protein, 10 aa, synthetic construct
  REGION 1..10: note = Description of Artificial Sequence: Synthetic peptide
  REGION 1..10: note = Synthetic Construct
ARHYDGYLDY

SEQ ID NO: 1530 - protein, 13 aa, synthetic construct
  REGION 1..13: note = Description of Artificial Sequence: Synthetic peptide
  REGION 1..13: note = Synthetic Construct
ATHYYRSTYAFSY

SEQ ID NO: 1531 - protein, 25 aa, synthetic construct
  REGION 1..25: note = Description of Artificial Sequence: Synthetic peptide
  REGION 1..25: note = Synthetic Construct
DIVMTQSHKFMSTSVGDRVSITCKA

SEQ ID NO: 1532 - protein, 25 aa, synthetic construct
  REGION 1..25: note = Description of Artificial Sequence: Synthetic peptide
  REGION 1..25: note = Synthetic Construct
DVLMTQTPLSLPVSLGDQASISCRS

SEQ ID NO: 1533 - protein, 25 aa, synthetic construct
  REGION 1..25: note = Description of Artificial Sequence: Synthetic peptide
  REGION 1..25: note = Synthetic Construct
DIVMTQSHKFMSTSIGARVSITCKA

SEQ ID NO: 1534 - protein, 25 aa, synthetic construct
  REGION 1..25: note = Description of Artificial Sequence: Synthetic peptide
  REGION 1..25: note = Synthetic Construct
DIVMTQSPKSMSMSVGERVTLTCKA

SEQ ID NO: 1535 - protein, 32 aa, synthetic construct
  REGION 1..32: note = Description of Artificial Sequence: Synthetic polypeptide
  REGION 1..32: note = Synthetic Construct
GVPDRFTGSGFGTDFTFTISSVQAEDLAVYYC

SEQ ID NO: 1536 - protein, 32 aa, synthetic construct
  REGION 1..32: note = Description of Artificial Sequence: Synthetic polypeptide
  REGION 1..32: note = Synthetic Construct
GVPDRFTGSGSGTDYTLTISSVQAEDLALYYC

SEQ ID NO: 1537 - protein, 32 aa, synthetic construct
  REGION 1..32: note = Description of Artificial Sequence: Synthetic polypeptide
  REGION 1..32: note = Synthetic Construct
GVPDRFTGSGSATDFTLTISSVQAEDLADYHC

SEQ ID NO: 1538 - protein, 32 aa, synthetic construct
  REGION 1..32: note = Description of Artificial Sequence: Synthetic polypeptide
  REGION 1..32: note = Synthetic Construct
GVPDRFTGSGSGTDFTFTISSVQAEDLAVYYC

SEQ ID NO: 1539 - protein, 24 aa, synthetic construct
  REGION 1..24: note = Description of Artificial Sequence: Synthetic peptide
  REGION 1..24: note = Synthetic Construct
EVQLVESGGGLVKPGGSLKLSCEA

SEQ ID NO: 1540 - protein, 24 aa, synthetic construct
  REGION 1..24: note = Description of Artificial Sequence: Synthetic peptide
  REGION 1..24: note = Synthetic Construct
QVQLQESGPGLVQPSQSLSIICTV

SEQ ID NO: 1541 - protein, 12 aa, synthetic construct
  REGION 1..12: note = Description of Artificial Sequence: Synthetic peptide
  REGION 1..12: note = Synthetic Construct
WIRQSPGKGLEW

SEQ ID NO: 1542 - protein, 35 aa, synthetic construct
  REGION 1..35: note = Description of Artificial Sequence: Synthetic polypeptide
  REGION 1..35: note = Synthetic Construct
DSMKGRFTISRDNAKNFLYLQMSSLRSEDTAMYYC

SEQ ID NO: 1543 - protein, 35 aa, synthetic construct
  REGION 1..35: note = Description of Artificial Sequence: Synthetic polypeptide
  REGION 1..35: note = Synthetic Construct
AAFISRLNISKDNSKSQVFFKMNSLQSDDTAIYYC

SEQ ID NO: 1544 - protein, 107 aa, synthetic construct
  REGION 1..107: note = Description of Artificial Sequence: Synthetic polypeptide
  REGION 1..107: note = Synthetic Construct
DIVMTQSHKFMSTSVGDRVSITCKASQDVSTTVAWYQQKPGQSPKLLIYSASYRYTGVPDRFTGSGFGTDFTFTISSVQAEDLAVYYCQQHYSTPPTFGGGTKLEIK

SEQ ID NO: 1545 - protein, 112 aa, synthetic construct
  REGION 1..112: note = Description of Artificial Sequence: Synthetic polypeptide
  REGION 1..112: note = Synthetic Construct
DVLMTQTPLSLPVSLGDQASISCRSSQSIVHSNGNTYLEWYLQKPGQSPKLLIYKVSNRFSGVPDRFSGSGSGTDFTLKISRVEAEDLGVYYCFQGSHVPFTFGSGTKLEIK

SEQ ID NO: 1546 - protein, 106 aa, synthetic construct
  REGION 1..106: note = Description of Artificial Sequence: Synthetic polypeptide
  REGION 1..106: note = Synthetic Construct
DIVMTQSHKFMSTSVGDRVSITCKASQGVSTAVAWYQQKPGQSPKLLIYWASTRHTGVPDRFTGSGSGTDYTLTISSVQAEDLALYYCHQHYSTYTFGGGTKLEIK

SEQ ID NO: 1547 - protein, 108 aa, synthetic construct
  REGION 1..108: note = Description of Artificial Sequence: Synthetic polypeptide
  REGION 1..108: note = Synthetic Construct
DIVMTQSHKFMSTSIGARVSITCKASQDVRTAVAWYQQKPGQSPKLLIYSASYRYTGVPDRFTGSGFGTDFTFTISSVQAEDLAVYYCQQHYGTPPWTFGGGTKLEIK

SEQ ID NO: 1548 - protein, 107 aa, synthetic construct
  REGION 1..107: note = Description of Artificial Sequence: Synthetic polypeptide
  REGION 1..107: note = Synthetic Construct
DIVMTQSPKSMSMSVGERVTLTCKASENVVTYVSWYQQKPEQSPKLLIYGASNRYTGVPDRFTGSGSATDFTLTISSVQAEDLADYHCGQGYSYPYTFGGGTKLEIK

SEQ ID NO: 1549 - protein, 108 aa, synthetic construct
  REGION 1..108: note = Description of Artificial Sequence: Synthetic polypeptide
  REGION 1..108: note = Synthetic Construct
DIVMTQSHKFMSTSIGARVSITCKASQDVRTAVAWYQQKPGQSPKLLIYSASYRYTGVPDRFTGSGSGTDFTFTISSVQAEDLAVYYCQQHYGTPPWTFGGGTKLEIK

SEQ ID NO: 1550 - protein, 107 aa, synthetic construct
  REGION 1..107: note = Description of Artificial Sequence: Synthetic polypeptide
  REGION 1..107: note = Synthetic Construct
DIVMTQSHKFMSTSVGDRVSITCKASQDVSTTVAWYQQKPGQSPKLLIYSASYRYTGVPDRFTGSGSGTDFTFTISSVQAEDLAVYYCQQHYSTPPTFGGGTKLEIK

SEQ ID NO: 1551 - protein, 117 aa, synthetic construct
  REGION 1..117: note = Description of Artificial Sequence: Synthetic polypeptide
  REGION 1..117: note = Synthetic Construct
EVQLVESGGGLVKPGGSLKLSCEASRFTFSSYAMSWVRQTPEKRLEWVAAISGGGRYTYYPDSMKGRFTISRDNAKNFLYLQMSSLRSEDTAMYYCARHYDGYLDYWGQGTTLTVSS

SEQ ID NO: 1552 - protein, 119 aa, synthetic construct
  REGION 1..119: note = Description of Artificial Sequence: Synthetic polypeptide
  REGION 1..119: note = Synthetic Construct
QVQLQESGPGLVQPSQSLSIICTVSAFSLTNYAVHWIRQSPGKGLEWLGVIWSGGSTAFNAAFISRLNISKDNSKSQVFFKMNSLQSDDTAIYYCATHYYRSTYAFSYWGQGTLVTVSA

SEQ ID NO: 1553 - protein, 117 aa, synthetic construct
  REGION 1..117: note = Description of Artificial Sequence: Synthetic polypeptide
  REGION 1..117: note = Synthetic Construct
EVQLVESGGGLVKPGGSLKLSCEASRFTFSSYAVSWVRQTPEKRLEWVATISGGGRYTYYPDSMKGRFTISRDNAKNFLYLQMSSLRSEDTAMYYCARHYDGYLDYWGQGTTLTVSS

SEQ ID NO: 1554 - protein, 14 aa, synthetic construct
  REGION 1..14: note = Description of Artificial Sequence: Synthetic peptide
  REGION 1..14: note = Synthetic Construct
SQSLVHSNGNTYLH

SEQ ID NO: 1555 - protein, 14 aa, synthetic construct
  REGION 1..14: note = Description of Artificial Sequence: Synthetic peptide
  REGION 1..14: note = Synthetic Construct
SQSLVHSNGDTYLH

SEQ ID NO: 1556 - protein, 13 aa, synthetic construct
  REGION 1..13: note = Description of Artificial Sequence: Synthetic peptide
  REGION 1..13: note = Synthetic Construct
SESVDYHGTSLMQ

SEQ ID NO: 1557 - protein, 9 aa, synthetic construct
  REGION 1..9: note = Description of Artificial Sequence: Synthetic peptide
  REGION 1..9: note = Synthetic Construct
  MOD_RES 5: note = Glutamic acid or Glutamine
SENIXYSLA

SEQ ID NO: 1558 - protein, 11 aa, synthetic construct
  REGION 1..11: note = Description of Artificial Sequence: Synthetic peptide
  REGION 1..11: note = Synthetic Construct
RASQSIGTSIH

SEQ ID NO: 1559 - protein, 7 aa, synthetic construct
  REGION 1..7: note = Description of Artificial Sequence: Synthetic peptide
  REGION 1..7: note = Synthetic Construct
KVSNRVS

SEQ ID NO: 1560 - protein, 7 aa, synthetic construct
  REGION 1..7: note = Description of Artificial Sequence: Synthetic peptide
  REGION 1..7: note = Synthetic Construct
KVSDRFS

SEQ ID NO: 1561 - protein, 7 aa, synthetic construct
  REGION 1..7: note = Description of Artificial Sequence: Synthetic peptide
  REGION 1..7: note = Synthetic Construct
AASNVES

SEQ ID NO: 1562 - protein, 7 aa, synthetic construct
  REGION 1..7: note = Description of Artificial Sequence: Synthetic peptide
  REGION 1..7: note = Synthetic Construct
NANSLED

SEQ ID NO: 1563 - protein, 7 aa, synthetic construct
  REGION 1..7: note = Description of Artificial Sequence: Synthetic peptide
  REGION 1..7: note = Synthetic Construct
FASESIS

SEQ ID NO: 1564 - protein, 9 aa, synthetic construct
  REGION 1..9: note = Description of Artificial Sequence: Synthetic peptide
  REGION 1..9: note = Synthetic Construct
QQNRKILWT

SEQ ID NO: 1565 - protein, 9 aa, synthetic construct
  REGION 1..9: note = Description of Artificial Sequence: Synthetic peptide
  REGION 1..9: note = Synthetic Construct
KQAYDVPWT

SEQ ID NO: 1566 - protein, 9 aa, synthetic construct
  REGION 1..9: note = Description of Artificial Sequence: Synthetic peptide
  REGION 1..9: note = Synthetic Construct
QQTNTWPIT

SEQ ID NO: 1567 - protein, 11 aa, synthetic construct
  REGION 1..11: note = Description of Artificial Sequence: Synthetic peptide
  REGION 1..11: note = Synthetic Construct
SGYTFTDFYMN

SEQ ID NO: 1568 - protein, 11 aa, synthetic construct
  REGION 1..11: note = Description of Artificial Sequence: Synthetic peptide
  REGION 1..11: note = Synthetic Construct
SGYTFTAYWMH

SEQ ID NO: 1569 - protein, 11 aa, synthetic construct
  REGION 1..11: note = Description of Artificial Sequence: Synthetic peptide
  REGION 1..11: note = Synthetic Construct
SGFNIKNTYIH

SEQ ID NO: 1570 - protein, 11 aa, synthetic construct
  REGION 1..11: note = Description of Artificial Sequence: Synthetic peptide
  REGION 1..11: note = Synthetic Construct
SGYTFTNYWIH

SEQ ID NO: 1571 - protein, 11 aa, synthetic construct
  REGION 1..11: note = Description of Artificial Sequence: Synthetic peptide
  REGION 1..11: note = Synthetic Construct
SGYTFTSATMH

SEQ ID NO: 1572 - protein, 9 aa, synthetic construct
  REGION 1..9: note = Description of Artificial Sequence: Synthetic peptide
  REGION 1..9: note = Synthetic Construct
YSFTDYNIH

SEQ ID NO: 1573 - protein, 9 aa, synthetic construct
  REGION 1..9: note = Description of Artificial Sequence: Synthetic peptide
  REGION 1..9: note = Synthetic Construct
FTLSNYWMN

SEQ ID NO: 1574 - protein, 9 aa, synthetic construct
  REGION 1..9: note = Description of Artificial Sequence: Synthetic peptide
  REGION 1..9: note = Synthetic Construct
YTFTDYNIH

SEQ ID NO: 1575 - protein, 14 aa, synthetic construct
  REGION 1..14: note = Description of Artificial Sequence: Synthetic peptide
  REGION 1..14: note = Synthetic Construct
IGDINPNNGHTTYN

SEQ ID NO: 1576 - protein, 14 aa, synthetic construct
  REGION 1..14: note = Description of Artificial Sequence: Synthetic peptide
  REGION 1..14: note = Synthetic Construct
IGRTHPSDSDTNYN

SEQ ID NO: 1577 - protein, 14 aa, synthetic construct
  REGION 1..14: note = Description of Artificial Sequence: Synthetic peptide
  REGION 1..14: note = Synthetic Construct
IGRIDPAIGNTNYA

SEQ ID NO: 1578 - protein, 14 aa, synthetic construct
  REGION 1..14: note = Description of Artificial Sequence: Synthetic peptide
  REGION 1..14: note = Synthetic Construct
IGRIHPSDSDINYN

SEQ ID NO: 1579 - protein, 14 aa, synthetic construct
  REGION 1..14: note = Description of Artificial Sequence: Synthetic peptide
  REGION 1..14: note = Synthetic Construct
IGYINPNSGYSKYN

SEQ ID NO: 1580 - protein, 14 aa, synthetic construct
  REGION 1..14: note = Description of Artificial Sequence: Synthetic peptide
  REGION 1..14: note = Synthetic Construct
IGYINPNSDNTRYI

SEQ ID NO: 1581 - protein, 16 aa, synthetic construct
  REGION 1..16: note = Description of Artificial Sequence: Synthetic peptide
  REGION 1..16: note = Synthetic Construct
VAQIRLKSDNYATHYA

SEQ ID NO: 1582 - protein, 14 aa, synthetic construct
  REGION 1..14: note = Description of Artificial Sequence: Synthetic peptide
  REGION 1..14: note = Synthetic Construct
IGYINPNNGGTTYN

SEQ ID NO: 1583 - protein, 16 aa, synthetic construct
  REGION 1..16: note = Description of Artificial Sequence: Synthetic peptide
  REGION 1..16: note = Synthetic Construct
AREPYSYGSSPWYFLV

SEQ ID NO: 1584 - protein, 13 aa, synthetic construct
  REGION 1..13: note = Description of Artificial Sequence: Synthetic peptide
  REGION 1..13: note = Synthetic Construct
ATYSNYVTGAMDS

SEQ ID NO: 1585 - protein, 7 aa, synthetic construct
  REGION 1..7: note = Description of Artificial Sequence: Synthetic peptide
  REGION 1..7: note = Synthetic Construct
VSPGMDY

SEQ ID NO: 1586 - protein, 9 aa, synthetic construct
  REGION 1..9: note = Description of Artificial Sequence: Synthetic peptide
  REGION 1..9: note = Synthetic Construct
VKTGTSFAS

SEQ ID NO: 1587 - protein, 16 aa, synthetic construct
  REGION 1..16: note = Description of Artificial Sequence: Synthetic peptide
  REGION 1..16: note = Synthetic Construct
ARWGIDGNYGGGFFDV

SEQ ID NO: 1588 - protein, 12 aa, synthetic construct
  REGION 1..12: note = Description of Artificial Sequence: Synthetic peptide
  REGION 1..12: note = Synthetic Construct
TRGFSNLGAMDY

SEQ ID NO: 1589 - protein, 10 aa, synthetic construct
  REGION 1..10: note = Description of Artificial Sequence: Synthetic peptide
  REGION 1..10: note = Synthetic Construct
TGAGGNHENY

SEQ ID NO: 1590 - protein, 9 aa, synthetic construct
  REGION 1..9: note = Description of Artificial Sequence: Synthetic peptide
  REGION 1..9: note = Synthetic Construct
ATTYVSFSY

SEQ ID NO: 1591 - protein, 25 aa, synthetic construct
  REGION 1..25: note = Description of Artificial Sequence: Synthetic peptide
  REGION 1..25: note = Synthetic Construct
  MOD_RES 1: note = Glutamic acid or Glutamine
  MOD_RES 4: note = Glutamic acid or Glutamine
XVVXTQTPLSLPVSLGDQASFSCRS

SEQ ID NO: 1592 - protein, 25 aa, synthetic construct
  REGION 1..25: note = Description of Artificial Sequence: Synthetic peptide
  REGION 1..25: note = Synthetic Construct
NIVMTQSPKSMSMSVGERVTLTCKA

SEQ ID NO: 1593 - protein, 25 aa, synthetic construct
  REGION 1..25: note = Description of Artificial Sequence: Synthetic peptide
  REGION 1..25: note = Synthetic Construct
DVVMTQTPLSLPVSLGDQASISCRS

SEQ ID NO: 1594 - protein, 25 aa, synthetic construct
  REGION 1..25: note = Description of Artificial Sequence: Synthetic peptide
  REGION 1..25: note = Synthetic Construct
DIVLTQSPASLAVSLGQRATISCRA

SEQ ID NO: 1595 - protein, 25 aa, synthetic construct
  REGION 1..25: note = Description of Artificial Sequence: Synthetic peptide
  REGION 1..25: note = Synthetic Construct
  MOD_RES 14: note = Glutamic acid or Glutamine
DIQMTQFPASLAAXVGESVTITCRA

SEQ ID NO: 1596 - protein, 22 aa, synthetic construct
  REGION 1..22: note = Description of Artificial Sequence: Synthetic peptide
  REGION 1..22: note = Synthetic Construct
ILLTQSPAILSVSPGERVSFSC

SEQ ID NO: 1597 - protein, 15 aa, synthetic construct
  REGION 1..15: note = Description of Artificial Sequence: Synthetic peptide
  REGION 1..15: note = Synthetic Construct
WFLQKPGQSPKLLIF

SEQ ID NO: 1598 - protein, 15 aa, synthetic construct
  REGION 1..15: note = Description of Artificial Sequence: Synthetic peptide
  REGION 1..15: note = Synthetic Construct
WYQQKPGQPPKLLIY

SEQ ID NO: 1599 - protein, 15 aa, synthetic construct
  REGION 1..15: note = Description of Artificial Sequence: Synthetic peptide
  REGION 1..15: note = Synthetic Construct
WYQQKQGKSPQLLIY

SEQ ID NO: 1600 - protein, 15 aa, synthetic construct
  REGION 1..15: note = Description of Artificial Sequence: Synthetic peptide
  REGION 1..15: note = Synthetic Construct
WYQQRTNGSPRLLIK

SEQ ID NO: 1601 - protein, 32 aa, synthetic construct
  REGION 1..32: note = Description of Artificial Sequence: Synthetic polypeptide
  REGION 1..32: note = Synthetic Construct
GVPDRFSGSGSGTDFTLRISRVEAEDLGVYFC

SEQ ID NO: 1602 - protein, 32 aa, synthetic construct
  REGION 1..32: note = Description of Artificial Sequence: Synthetic polypeptide
  REGION 1..32: note = Synthetic Construct
GVPARFSGSGSGTDFSLNIHPVEEDDIAMYFC

SEQ ID NO: 1603 - protein, 32 aa, synthetic construct
  REGION 1..32: note = Description of Artificial Sequence: Synthetic polypeptide
  REGION 1..32: note = Synthetic Construct
GVPSRFSGSGSGTQYSMKINSMQPEDTAIYFC

SEQ ID NO: 1604 - protein, 32 aa, synthetic construct
  REGION 1..32: note = Description of Artificial Sequence: Synthetic polypeptide
  REGION 1..32: note = Synthetic Construct
GIPSRFSGSGSGTDFTLNINSVESEDIADYYC

SEQ ID NO: 1605 - protein, 24 aa, synthetic construct
  REGION 1..24: note = Description of Artificial Sequence: Synthetic peptide
  REGION 1..24: note = Synthetic Construct
  MOD_RES 4: note = Glutamic acid or Glutamine
EVQXQQSGPELVKPGASVKISCKA

SEQ ID NO: 1606 - protein, 24 aa, synthetic construct
  REGION 1..24: note = Description of Artificial Sequence: Synthetic peptide
  REGION 1..24: note = Synthetic Construct
QVQLQQPGAELVKPGASVKVSCKA

SEQ ID NO: 1607 - protein, 24 aa, synthetic construct
  REGION 1..24: note = Description of Artificial Sequence: Synthetic peptide
  REGION 1..24: note = Synthetic Construct
QVQLQQSVAELVRPGASVKLSCTA

SEQ ID NO: 1608 - protein, 24 aa, synthetic construct
  REGION 1..24: note = Description of Artificial Sequence: Synthetic peptide
  REGION 1..24: note = Synthetic Construct
QVQLQQSGAELVKPGASVKVSCKA

SEQ ID NO: 1609 - protein, 24 aa, synthetic construct
  REGION 1..24: note = Description of Artificial Sequence: Synthetic peptide
  REGION 1..24: note = Synthetic Construct
  MOD_RES 1..2: note = Any Amino Acid
  MOD_RES 3..5: note = Any naturally occurring amino acid
XXXXXQSGTELARPGASVKMPCKA

SEQ ID NO: 1610 - protein, 26 aa, synthetic construct
  REGION 1..26: note = Description of Artificial Sequence: Synthetic peptide
  REGION 1..26: note = Synthetic Construct
QVQLQQSGRELVKPGASVKMSCMSSG

SEQ ID NO: 1611 - protein, 26 aa, synthetic construct
  REGION 1..26: note = Description of Artificial Sequence: Synthetic peptide
  REGION 1..26: note = Synthetic Construct
QVKLEESGGGLVQPGGSMKLSCVASG

SEQ ID NO: 1612 - protein, 26 aa, synthetic construct
  REGION 1..26: note = Description of Artificial Sequence: Synthetic peptide
  REGION 1..26: note = Synthetic Construct
QVQLQQSGPELVKPGASVQMSCEASG

SEQ ID NO: 1613 - protein, 12 aa, synthetic construct
  REGION 1..12: note = Description of Artificial Sequence: Synthetic peptide
  REGION 1..12: note = Synthetic Construct
WVKQSLGKSLEW

SEQ ID NO: 1614 - protein, 12 aa, synthetic construct
  REGION 1..12: note = Description of Artificial Sequence: Synthetic peptide
  REGION 1..12: note = Synthetic Construct
WVKEKPGQGLEW

SEQ ID NO: 1615 - protein, 12 aa, synthetic construct
  REGION 1..12: note = Description of Artificial Sequence: Synthetic peptide
  REGION 1..12: note = Synthetic Construct
WVKQRPEQGLEW

SEQ ID NO: 1616 - protein, 12 aa, synthetic construct
  REGION 1..12: note = Description of Artificial Sequence: Synthetic peptide
  REGION 1..12: note = Synthetic Construct
WVKQRPGQGLEW

SEQ ID NO: 1617 - protein, 12 aa, synthetic construct
  REGION 1..12: note = Description of Artificial Sequence: Synthetic peptide
  REGION 1..12: note = Synthetic Construct
WVIQSHGESLEW

SEQ ID NO: 1618 - protein, 35 aa, synthetic construct
  REGION 1..35: note = Description of Artificial Sequence: Synthetic polypeptide
  REGION 1..35: note = Synthetic Construct
  MOD_RES 27: note = Glutamic acid or Glutamine
QKFKGKATLTVDKSSSTAYMELRSLTXEESAVYYC

SEQ ID NO: 1619 - protein, 35 aa, synthetic construct
  REGION 1..35: note = Description of Artificial Sequence: Synthetic polypeptide
  REGION 1..35: note = Synthetic Construct
HNFKGKATLTVDKSSSTAYMQLNSLTSEDSAVYYC

SEQ ID NO: 1620 - protein, 35 aa, synthetic construct
  REGION 1..35: note = Description of Artificial Sequence: Synthetic polypeptide
  REGION 1..35: note = Synthetic Construct
PKFQATATITVATSSNSAYLQLSSLASEDTAIYYC

SEQ ID NO: 1621 - protein, 36 aa, synthetic construct
  REGION 1..36: note = Description of Artificial Sequence: Synthetic polypeptide
  REGION 1..36: note = Synthetic Construct
QKFKGKATLTVDKSSSTAYMQILSSLTSEDSAVYYC

SEQ ID NO: 1622 - protein, 35 aa, synthetic construct
  REGION 1..35: note = Description of Artificial Sequence: Synthetic polypeptide
  REGION 1..35: note = Synthetic Construct
QKFKDKATLTADKSSSTAYMQLSSLTSEESAVYYC

SEQ ID NO: 1623 - protein, 35 aa, synthetic construct
  REGION 1..35: note = Description of Artificial Sequence: Synthetic polypeptide
  REGION 1..35: note = Synthetic Construct
QKFKGKATLTVNKSSSTAYMELRSLTSEDSAVYYC

SEQ ID NO: 1624 - protein, 35 aa, synthetic construct
  REGION 1..35: note = Description of Artificial Sequence: Synthetic polypeptide
  REGION 1..35: note = Synthetic Construct
ESVKGRFTISRDDSKSSVYLQMNNLRAVDTGIYYC

SEQ ID NO: 1625 - protein, 35 aa, synthetic construct
  REGION 1..35: note = Description of Artificial Sequence: Synthetic polypeptide
  REGION 1..35: note = Synthetic Construct
QKFKGKATLTVNKSSSTAYIELRSLTSEDSAVYHC

SEQ ID NO: 1626 - protein, 9 aa, synthetic construct
  REGION 1..9: note = Description of Artificial Sequence: Synthetic peptide
  REGION 1..9: note = Synthetic Construct
RGTGTTVTV

SEQ ID NO: 1627 - protein, 11 aa, synthetic construct
  REGION 1..11: note = Description of Artificial Sequence: Synthetic peptide
  REGION 1..11: note = Synthetic Construct
WGHGTSVTVSS

SEQ ID NO: 1628 - protein, 10 aa, synthetic construct
  REGION 1..10: note = Description of Artificial Sequence: Synthetic peptide
  REGION 1..10: note = Synthetic Construct
WSQGTLVTVS

SEQ ID NO: 1629 - protein, 112 aa, synthetic construct
  REGION 1..112: note = Description of Artificial Sequence: Synthetic polypeptide
  REGION 1..112: note = Synthetic Construct
  MOD_RES 1: note = Glutamic acid or Glutamine
  MOD_RES 4: note = Glutamic acid or Glutamine
XVVXTQTPLSLPVSLGDQASFSCRSSQSLVHSNGNTYLHWFLQKPGQSPKLLIFKVSNRVSGVPDRFSGSGSGTDFTLKISRVEAEDLGVYFCSQSTHVPLTFGAGTKLELK

SEQ ID NO: 1630 - protein, 107 aa, synthetic construct
  REGION 1..107: note = Description of Artificial Sequence: Synthetic polypeptide
  REGION 1..107: note = Synthetic Construct
NIVMTQSPKSMSMSVGERVTLTCKASENVVTYVSWYQQKPEQSPKLLIYGASNRYTGVPDRFTGSGSATDFTLTISSVQAEDLADYHCGQGYSYPYTFGGGTKLEIK

SEQ ID NO: 1631 - protein, 112 aa, synthetic construct
  REGION 1..112: note = Description of Artificial Sequence: Synthetic polypeptide
  REGION 1..112: note = Synthetic Construct
DVVMTQTPLSLPVSLGDQASISCRSSQSLVHSNGNTYLHWYLQKPGQSPKLLIYKVSDRFSGVPDRFSGSGSGTDFTLRISRVEAEDLGVYFCSQSTHVPLTFGAGTKLELK

SEQ ID NO: 1632 - protein, 112 aa, synthetic construct
  REGION 1..112: note = Description of Artificial Sequence: Synthetic polypeptide
  REGION 1..112: note = Synthetic Construct
DVVMTQTPLSLPVSLGDQASISCRSSQSLVHSNGDTYLHWYLQKPGQSPKLLIYKVSNRFSGVPDRFSGSGSGTDFTLKISRVEAEDLGVYFCSQSTHVPLTFGAGTKLELK

SEQ ID NO: 1633 - protein, 111 aa, synthetic construct
  REGION 1..111: note = Description of Artificial Sequence: Synthetic polypeptide
  REGION 1..111: note = Synthetic Construct
DIVLTQSPASLAVSLGQRATISCRASESVDYHGTSLMQWYQQKPGQPPKLLIYAASNVESGVPARFSGSGSGTDFSLNIHPVEEDDIAMYFCQQNRKILWTFGGGTKLEIK

SEQ ID NO: 1634 - protein, 107 aa, synthetic construct
  REGION 1..107: note = Description of Artificial Sequence: Synthetic polypeptide
  REGION 1..107: note = Synthetic Construct
  MOD_RES 14: note = Glutamic acid or Glutamine
  MOD_RES 30: note = Glutamic acid or Glutamine
DIQMTQFPASLAAXVGESVTITCRASENIXYSLAWYQQKQGKSPQLLIYNANSLEDGVPSRFSGSGSGTQYSMKINSMQPEDTAIYFCKQAYDVPWTFGGGTKLEIK

SEQ ID NO: 1635 - protein, 106 aa, synthetic construct
  REGION 1..106: note = Description of Artificial Sequence: Synthetic polypeptide
  REGION 1..106: note = Synthetic Construct
ILLTQSPAILSVSPGERVSFSCRASQSIGTSIHWYQQRTNGSPRLLIKFASESISGIPSRFSGSGSGTDFTLNINSVESEDIADYYCQQTNTWPITFGAGTKLELK

SEQ ID NO: 1636 - protein, 112 aa, synthetic construct
  REGION 1..112: note = Description of Artificial Sequence: Synthetic polypeptide
  REGION 1..112: note = Synthetic Construct
DVVMTQTPLSLPVSLGDQASISCRSSQSLVHSNGNTYLHWYLQKPGQSPKLLIYKVSNRFSGVPDRFSGSGSGTDFTLKISRVEAEDLGVYFCSQSTHVPLTFGAGTKLELK

SEQ ID NO: 1637 - protein, 121 aa, synthetic construct
  REGION 1..121: note = Description of Artificial Sequence: Synthetic polypeptide
  REGION 1..121: note = Synthetic Construct
  MOD_RES 4: note = Glutamic acid or Glutamine
  MOD_RES 88: note = Glutamic acid or Glutamine
EVQXQQSGPELVKPGASVKISCKASGYTFTDFYMNWVKQSLGKSLEWIGDINPNNGHTTYNQKFKGKATLTVDKSSSTAYMELRSLTXEESAVYYCAREPYSYGSSPWYFLVRGTGTTVTV

SEQ ID NO: 1638 - protein, 120 aa, synthetic construct
  REGION 1..120: note = Description of Artificial Sequence: Synthetic polypeptide
  REGION 1..120: note = Synthetic Construct
QVQLQQPGAELVKPGASVKVSCKASGYTFTAYWMHWVKEKPGQGLEWIGRTHPSDSDTNYNHNFKGKATLTVDKSSSTAYMQLNSLTSEDSAVYYCATYSNYVTGAMDSWGQGTSVTVSS

SEQ ID NO: 1639 - protein, 114 aa, synthetic construct
  REGION 1..114: note = Description of Artificial Sequence: Synthetic polypeptide
  REGION 1..114: note = Synthetic Construct
QVQLQQSVAELVRPGASVKLSCTASGFNIKNTYIHWVKQRPEQGLEWIGRIDPAIGNTNYAPKFQATATITVATSSNSAYLQLSSLASEDTAIYYCVSPGMDYWGHGTSVTVSS

SEQ ID NO: 1640 - protein, 116 aa, synthetic construct
  REGION 1..116: note = Description of Artificial Sequence: Synthetic polypeptide
  REGION 1..116: note = Synthetic Construct
QVQLQQSGAELVKPGASVKVSCKASGYTFTNYWIHWVKQRPGQGLEWIGRIHPSDSDINYNQKFKGKATLTVDKSSSTAYMQILSSLTSEDSAVYYCVKTGTSFASWSQGTLVTVS

SEQ ID NO: 1641 - protein, 105 aa, synthetic construct
  REGION 1..105: note = Description of Artificial Sequence: Synthetic polypeptide
  REGION 1..105: note = Synthetic Construct
EIVLTQSPATLSLSPGERATLSCKASSNVNYMSWYQQKPGQAPRLLIYFTSNLPSGIPARFSGSGSGTDFTLTISSLEPEDFAVYYCSGEVTQFTFGQGTKVEIK

SEQ ID NO: 1642 - protein, 123 aa, synthetic construct
  REGION 1..123: note = Description of Artificial Sequence: Synthetic polypeptide
  REGION 1..123: note = Synthetic Construct
  MOD_RES 1..2: note = Any Amino Acid
  MOD_RES 3..5: note = Any naturally occurring amino acid
XXXXXQSGTELARPGASVKMPCKASGYTFTSATMHWVKQRPGQGLEWIGYINPNSGYSKYNQKFKDKATLTADKSSSTAYMQLSSLTSEESAVYYCARWGIDGNYGGGFFDVWGTGTTVTVSS

SEQ ID NO: 1643 - protein, 119 aa, synthetic construct
  REGION 1..119: note = Description of Artificial Sequence: Synthetic polypeptide
  REGION 1..119: note = Synthetic Construct
QVQLQQSGRELVKPGASVKMSCMSSGYSFTDYNIHWVIQSHGESLEWIGYINPNSDNTRYIQKFKGKATLTVNKSSSTAYMELRSLTSEDSAVYYCTRGFSNLGAMDYWGQGTSVTVSS

SEQ ID NO: 1644 - protein, 119 aa, synthetic construct
  REGION 1..119: note = Description of Artificial Sequence: Synthetic polypeptide
  REGION 1..119: note = Synthetic Construct
QVKLEESGGGLVQPGGSMKLSCVASGFTLSNYWMNWVRQSPEKGLEWVAQIRLKSDNYATHYAESVKGRFTISRDDSKSSVYLQMNNLRAVDTGIYYCTGAGGNHENYWGQGTTLTVSS

SEQ ID NO: 1645 - protein, 116 aa, synthetic construct
  REGION 1..116: note = Description of Artificial Sequence: Synthetic polypeptide
  REGION 1..116: note = Synthetic Construct
QVQLQQSGPELVKPGASVQMSCEASGYTFTDYNIHWVKQSHGKSLEWIGYINPNNGGTTYNQKFKGKATLTVNKSSSTAYIELRSLTSEDSAVYHCATTYVSFSYWGQGTLVTVSA

SEQ ID NO: 1646 - protein, 11 aa, synthetic construct
  REGION 1..11: note = Description of Artificial Sequence: Synthetic peptide
  REGION 1..11: note = Synthetic Construct
  MOD_RES 2: note = Any Amino Acid
  MOD_RES 6: note = Any Amino Acid
  MOD_RES 9: note = Any naturally occurring amino acid
RXSENXYSXLA

SEQ ID NO: 1647 - protein, 16 aa, synthetic construct
  REGION 1..16: note = Description of Artificial Sequence: Synthetic peptide
  REGION 1..16: note = Synthetic Construct
  MOD_RES 5..6: note = Any Amino Acid
  MOD_RES 7: note = Any naturally occurring amino acid
  MOD_RES 12: note = Any naturally occurring amino acid
  MOD_RES 16: note = Any naturally occurring amino acid
RSSQXXXHSNGXTYLX

SEQ ID NO: 1648 - protein, 17 aa, synthetic construct
  REGION 1..17: note = Description of Artificial Sequence: Synthetic peptide
  REGION 1..17: note = Synthetic Construct
  MOD_RES 6..7: note = Any Amino Acid
  MOD_RES 8: note = Any naturally occurring amino acid
  MOD_RES 10..11: note = Any naturally occurring amino acid
  MOD_RES 14..15: note = Any naturally occurring amino acid
  MOD_RES 17: note = Any naturally occurring amino acid
KSSQSXXXSXXQKXXLX

SEQ ID NO: 1649 - skipped

SEQ ID NO: 1650 - protein, 9 aa, synthetic construct
  REGION 1..9: note = Description of Artificial Sequence: Synthetic peptide
  REGION 1..9: note = Synthetic Construct
  MOD_RES 5: note = Any Amino Acid
  MOD_RES 7: note = Any Amino Acid
  MOD_RES 8: note = Any naturally occurring amino acid
YTFTXYXXH

SEQ ID NO: 1651 - protein, 9 aa, synthetic construct
  REGION 1..9: note = Description of Artificial Sequence: Synthetic peptide
  REGION 1..9: note = Synthetic Construct
  MOD_RES 9: note = D or G
FTFSDAWMX

SEQ ID NO: 1652 - skipped

SEQ ID NO: 1653 - protein, 9 aa, synthetic construct
  REGION 1..9: note = Description of Artificial Sequence: Synthetic peptide
  REGION 1..9: note = Synthetic Construct
  MOD_RES 2: note = Any Amino Acid
FXFNTYAMN

SEQ ID NO: 1654 - skipped

SEQ ID NO: 1655 - protein, 9 aa, synthetic construct
  REGION 1..9: note = Description of Artificial Sequence: Synthetic peptide
  REGION 1..9: note = Synthetic Construct
  MOD_RES 2: note = Any Amino Acid
  MOD_RES 6: note = Any Amino Acid
  MOD_RES 9: note = Any naturally occurring amino acid
YXFSNXWIX

SEQ ID NO: 1656 - protein, 14 aa, synthetic construct
  REGION 1..14: note = Description of Artificial Sequence: Synthetic peptide
  REGION 1..14: note = Synthetic Construct
  MOD_RES 3..4: note = Any Amino Acid
  MOD_RES 5: note = Any naturally occurring amino acid
  MOD_RES 7: note = N or E
  MOD_RES 8: note = N, S, or T
  MOD_RES 9: note = G or D
  MOD_RES 10: note = G, D, or N
  MOD_RES 11: note = T, S, or N
  MOD_RES 12: note = Any Amino Acid
  MOD_RES 14: note = N, S, K, or I
IGXXXPXXXXXXYX

SEQ ID NO: 1657 - protein, 14 aa, synthetic construct
  REGION 1..14: note = Description of Artificial Sequence: Synthetic peptide
  REGION 1..14: note = Synthetic Construct
  MOD_RES 3..4: note = Any Amino Acid
  MOD_RES 5: note = Any naturally occurring amino acid
  MOD_RES 12: note = Any naturally occurring amino acid
IGXXXPNNGGTXYN

SEQ ID NO: 1658 - protein, 16 aa, synthetic construct
  REGION 1..16: note = Description of Artificial Sequence: Synthetic peptide
  REGION 1..16: note = Synthetic Construct
  MOD_RES 6: note = N or D
  MOD_RES 8: note = V or I
  MOD_RES 9: note = N or K
VAEIRXKXXNHATYYA

SEQ ID NO: 1659 - protein, 16 aa, synthetic construct
  REGION 1..16: note = Description of Artificial Sequence: Synthetic peptide
  REGION 1..16: note = Synthetic Construct
  MOD_RES 1: note = Any Amino Acid
  MOD_RES 2: note = A or G
  MOD_RES 3: note = Any Amino Acid
  MOD_RES 5: note = R or K
  MOD_RES 6: note = S, T, R, or L
  MOD_RES 7: note = K or N
  MOD_RES 8: note = S, E, or Q
  MOD_RES 9: note = N, S, or D
  MOD_RES 10: note = N or D
  MOD_RES 11: note = Y or F
  MOD_RES 14: note = Any Amino Acid
  MOD_RES 16: note = A or S
XXXIXXXXXXXATXYX

SEQ ID NO: 1660 - protein, 16 aa, synthetic construct
  REGION 1..16: note = Description of Artificial Sequence: Synthetic peptide
  REGION 1..16: note = Synthetic Construct
  MOD_RES 1: note = Any Amino Acid
  MOD_RES 3: note = Any Amino Acid
  MOD_RES 14: note = Any naturally occurring amino acid
XAXIRSKSNNYATXYA

SEQ ID NO: 1661 - protein, 14 aa, synthetic construct
  REGION 1..14: note = Description of Artificial Sequence: Synthetic peptide
  REGION 1..14: note = Synthetic Construct
  MOD_RES 3: note = Any Amino Acid
  MOD_RES 5: note = Y or D
  MOD_RES 7: note = G or N
  MOD_RES 8: note = Any Amino Acid
  MOD_RES 9: note = G or D
  MOD_RES 10: note = N or D
  MOD_RES 11: note = T, R, or S
  MOD_RES 12: note = N or K
  MOD_RES 13: note = Y or F
IGXIXPXXXXXXXN

SEQ ID NO: 1662 - protein, 14 aa, synthetic construct
  REGION 1..14: note = Description of Artificial Sequence: Synthetic peptide
  REGION 1..14: note = Synthetic Construct
  MOD_RES 3: note = Any Amino Acid
  MOD_RES 8: note = Any Amino Acid
IGXIYPGXGDTNYN

SEQ ID NO: 1663 - protein, 112 aa, synthetic construct
  REGION 1..112: note = Description of Artificial Sequence: Synthetic polypeptide
  REGION 1..112: note = Synthetic Construct
DIVMTQTPLSLSVTPGQPASISCRSSQSLVHSNGYTYLHWYLQKPGQSPQLLIYKVSNRFSGVPDRFSGSGSGTDFTLKISRVEAEDVGVYYCSQSTRVPYTFGQGTKLEIK

SEQ ID NO: 1664 - protein, 112 aa, synthetic construct
  REGION 1..112: note = Description of Artificial Sequence: Synthetic polypeptide
  REGION 1..112: note = Synthetic Construct
DVVMTQTPLSLSVTPGQPASISCRSSQSLVHSNGYTYLHWYLQKPGQSPQLLIYKVSNRFSGVPDRFSGSGSGTDFTLKISRVEAEDVGVYYCSQSTRVPYTFGQGTKLEIK

SEQ ID NO: 1665 - protein, 123 aa, synthetic construct
  REGION 1..123: note = Description of Artificial Sequence: Synthetic polypeptide
  REGION 1..123: note = Synthetic Construct
QVQLVQSGAEVKKPGASVKVSCKASGYAFSSSWMNWVRQAPGQGLEWMGRIYPGDGDTNYAQKFQGRVTMTRDTSTSTVYMELSSLRSEDTAVYYCARLLRNQPGESYAMDYWGQGTLVTVSS

SEQ ID NO: 1666 - protein, 123 aa, synthetic construct
  REGION 1..123: note = Description of Artificial Sequence: Synthetic polypeptide
  REGION 1..123: note = Synthetic Construct
QVQLVQSGAEVKKPGASVKVSCKASGYAFSSSWMNWVRQAPGQGLEWIGRIYPGDGDTNYAQKFQGRVTMTADTSTSTVYMELSSLRSEDTAVYYCARLLRNQPGESYAMDYWGQGTLVTVSS

SEQ ID NO: 1667 - protein, 123 aa, synthetic construct
  REGION 1..123: note = Description of Artificial Sequence: Synthetic polypeptide
  REGION 1..123: note = Synthetic Construct
QVQLVQSGAEVKKPGASLKISCKASGYAFSSSWMNWVRQAPGQGLEWIGRIYPGDGDTNYAQKFQGRATLTADTSTSTAYMELSSLRSEDTAVYYCARLLRNQPGESYAMDYWGQGALVTVSS

SEQ ID NO: 1668 - protein, 32 aa, synthetic construct
  REGION 1..32: note = Description of Artificial Sequence: Synthetic polypeptide
  REGION 1..32: note = Synthetic Construct
GVPDRFSGSGSGTDFTLKISRVEADDLGVYFC

SEQ ID NO: 1669 - protein, 112 aa, synthetic construct
  REGION 1..112: note = Description of Artificial Sequence: Synthetic polypeptide
  REGION 1..112: note = Synthetic Construct
DVVMTQTPLTLSVTIGQPASISCKSSQSLLYSNGKTFLSWLLQRPGQSPKRLIYLVSKLDSGVPDRFAGSGSGTDFTLKISRLEADDLGIYYCMQGTHFPLTFGAGTKLELK

SEQ ID NO: 1670 - protein, 112 aa, synthetic construct
  REGION 1..112: note = Description of Artificial Sequence: Synthetic polypeptide
  REGION 1..112: note = Synthetic Construct
DVVMTQTPLSLPVSLGDQASISCRSSQSLVHSNGYTYLHWYLQKPGQSPKLLIYKVSNRFSGVPDRFSGSGSGTDFTLKISRVEADDLGVYFCSQSTRVPYTFGGGTKLEIK

SEQ ID NO: 1671 - protein, 126 aa, Homo sapiens; identical to SEQ ID NO: 801

SEQ ID NO: 1672 - protein, 132 aa, synthetic construct; identical to SEQ ID NO: 820
  REGION 1..132: note = Description of Artificial Sequence: Synthetic polypeptide
  REGION 1..132: note = Consensus Sequence
  MOD_RES 1..2: note = Any Amino Acid
  MOD_RES 5: note = Any naturally occurring amino acid
  MOD_RES 8: note = Any naturally occurring amino acid
  MOD_RES 12..22: note = Any naturally occurring amino acid
  MOD_RES 24: note = Any naturally occurring amino acid
  MOD_RES 26: note = Any naturally occurring amino acid
  MOD_RES 31: note = Any naturally occurring amino acid
  MOD_RES 33: note = Any naturally occurring amino acid
  MOD_RES 35: note = Any naturally occurring amino acid
  MOD_RES 37: note = Any naturally occurring amino acid
  MOD_RES 39..47: note = Any naturally occurring amino acid
  MOD_RES 49: note = Any naturally occurring amino acid
  MOD_RES 52..59: note = Any naturally occurring amino acid
  MOD_RES 61: note = Any naturally occurring amino acid
  MOD_RES 63: note = Any naturally occurring amino acid
  MOD_RES 65..77: note = Any naturally occurring amino acid
  MOD_RES 79..83: note = Any naturally occurring amino acid
  MOD_RES 85: note = Any Amino Acid
  MOD_RES 88: note = Any Amino Acid
  MOD_RES 89..90: note = Any naturally occurring amino acid
  MOD_RES 92..93: note = Any naturally occurring amino acid
  MOD_RES 95: note = Any naturally occurring amino acid
  MOD_RES 97..99: note = Any naturally occurring amino acid
  MOD_RES 101..103: note = Any naturally occurring amino acid
  MOD_RES 105: note = Any naturally occurring amino acid
  MOD_RES 107: note = Any naturally occurring amino acid
  MOD_RES 109: note = Any naturally occurring amino acid
  MOD_RES 111..115: note = Any naturally occurring amino acid
  MOD_RES 117..123: note = Any naturally occurring amino acid
  MOD_RES 125..131: note = Any naturally occurring amino acid

SEQ ID NO: 1673 - protein, 118 aa, Homo sapiens; identical to SEQ ID NO: 803

SEQ ID NO: 1674 - protein, 121 aa, Homo sapiens; identical to SEQ ID NO: 804

SEQ ID NO: 1675 - protein, 120 aa, Mus musculus; identical to SEQ ID NO: 805

SEQ ID NO: 1676 - protein, 121 aa, Mus musculus; identical to SEQ ID NO: 806

SEQ ID NO: 1677 - protein, 121 aa, Mus musculus; identical to SEQ ID NO: 807

SEQ ID NO: 1678 - protein, 112 aa, Homo sapiens; identical to SEQ ID NO: 808

SEQ ID NO: 1679 - protein, 109 aa, Homo sapiens; identical to SEQ ID NO: 809

SEQ ID NO: 1680 - protein, 114 aa, Homo sapiens; identical to SEQ ID NO: 810

SEQ ID NO: 1681 - protein, 120 aa, Homo sapiens
HLEQPQISSTKTLSKTARLECVVSGITISATSVYWYRERPGEVIQFLVSISYDGTVRKESGIPSGKFEVDRIPETSTSTLTIHNVEKQDIATYYCALWEAQQELGKKIKVFGPGTKLIIT

SEQ ID NO: 1682 - protein, 119 aa, Homo sapiens; identical to SEQ ID NO: 812

SEQ ID NO: 1683 - protein, 116 aa, Homo sapiens; identical to SEQ ID NO: 813

SEQ ID NO: 1684 - protein, 115 aa, Mus musculus; identical to SEQ ID NO: 814

SEQ ID NO: 1685 - protein, 103 aa, Mus musculus; identical to SEQ ID NO: 815

SEQ ID NO: 1686 - protein, 113 aa, Homo sapiens; identical to SEQ ID NO: 816

SEQ ID NO: 1687 - protein, 115 aa, Homo sapiens; identical to SEQ ID NO: 817

SEQ ID NO: 1688 - protein, 105 aa, Homo sapiens; identical to SEQ ID NO: 802

SEQ ID NO: 1689 - protein, 107 aa, synthetic construct; identical to SEQ ID NO: 821
  REGION 1..107: note = Description of Artificial Sequence: Synthetic polypeptide
  REGION 1..107: note = Consensus Sequence
  MOD_RES 3..4: note = Any Amino Acid
  MOD_RES 8: note = Any naturally occurring amino acid
  MOD_RES 11..12: note = Any naturally occurring amino acid
  MOD_RES 14..16: note = Any naturally occurring amino acid
  MOD_RES 18..25: note = Any naturally occurring amino acid
  MOD_RES 28: note = Any naturally occurring amino acid
  MOD_RES 30: note = Any naturally occurring amino acid
  MOD_RES 32: note = Any naturally occurring amino acid
  MOD_RES 34: note = Any naturally occurring amino acid
  MOD_RES 36..38: note = Any naturally occurring amino acid
  MOD_RES 40..44: note = Any naturally occurring amino acid
  MOD_RES 48..49: note = Any naturally occurring amino acid
  MOD_RES 51..54: note = Any naturally occurring amino acid
  MOD_RES 56..76: note = Any naturally occurring amino acid
  MOD_RES 78..81: note = Any naturally occurring amino acid
  MOD_RES 82: note = Any Amino Acid
  MOD_RES 84: note = Any Amino Acid
  MOD_RES 85..87: note = Any naturally occurring amino acid
  MOD_RES 89: note = Any naturally occurring amino acid
  MOD_RES 91..95: note = Any naturally occurring amino acid
  MOD_RES 99..100: note = Any naturally occurring amino acid
  MOD_RES 102: note = Any naturally occurring amino acid

SEQ ID NO: 1690 - protein, 101 aa, synthetic construct
  REGION 1..101: note = Description of Artificial Sequence: Synthetic polypeptide
  REGION 1..101: note = Synthetic Construct
DIVMTQTPLSLSVTPGQPASISCKSSQSLLHSDGKTYLYWYLQKPGQSPQLLIYEVSNRFSGVPDRFSGSGSGTDFTLKISRVEAEDVGVYYCMQSIQLPP

SEQ ID NO: 1691 - protein, 12 aa, synthetic construct
  REGION 1..12: note = Description of Artificial Sequence: Synthetic peptide
  REGION 1..12: note = Synthetic Construct
YTFGQGTKLEIK

SEQ ID NO: 1692 - protein, 112 aa, synthetic construct; identical to SEQ ID NO: 1670
  REGION 1..112: note = Description of Artificial Sequence: Synthetic polypeptide
  REGION 1..112: note = Synthetic Construct

SEQ ID NO: 1693 - protein, 111 aa, synthetic construct
  REGION 1..111: note = Description of Artificial Sequence: Synthetic polypeptide
  REGION 1..111: note = Synthetic Construct
DIVMTQTPLSLSVTPGQPASISCKSSQSLLHSDGKTYLYWYLQKPGQSPQLLIYEVSNRFSGVPDRFSGSGSGTDFTLKISRVEAEDVGVYYCMQSIQLPPFGQGTKLEIK

SEQ ID NO: 1694 - protein, 112 aa, synthetic construct; identical to SEQ ID NO: 1663
  REGION 1..112: note = Description of Artificial Sequence: Synthetic polypeptide
  REGION 1..112: note = Synthetic Construct

SEQ ID NO: 1695 - protein, 112 aa, synthetic construct; identical to SEQ ID NO: 1664
  REGION 1..112: note = Description of Artificial Sequence: Synthetic polypeptide
  REGION 1..112: note = Synthetic Construct

SEQ ID NO: 1696 - protein, 98 aa, synthetic construct
  REGION 1..98: note = Description of Artificial Sequence: Synthetic polypeptide
  REGION 1..98: note = Synthetic Construct
QVQLVQSGAEVKKPGASVKVSCKASGYTFTSYYMHWVRQAPGQGLEWMGIINPSGGSTSYAQKFQGRVTMTRDTSTSTVYMELSSLRSEDTAVYYCAR

SEQ ID NO: 1697 - protein, 15 aa, synthetic construct
  REGION 1..15: note = Description of Artificial Sequence: Synthetic peptide
  REGION 1..15: note = Synthetic Construct
YFDYWGQGTLVTVSS

SEQ ID NO: 1698 - protein, 123 aa, synthetic construct; identical to SEQ ID NO: 1341
  REGION 1..123: note = Description of Artificial Sequence: Synthetic polypeptide
  REGION 1..123: note = Synthetic Construct

SEQ ID NO: 1699 - protein, 109 aa, synthetic construct
  REGION 1..109: note = Description of Artificial Sequence: Synthetic polypeptide
  REGION 1..109: note = Synthetic Construct
QVQLVQSGAEVKKPGASVKVSCKASGYTFTSYYMHWVRQAPGQGLEWMGIINPSGGSTSYAQKFQGRVTMTRDTSTSTVYMELSSLRSEDTAVYYCARWGQGTLVTVSS

SEQ ID NO: 1700 - protein, 123 aa, synthetic construct; identical to SEQ ID NO: 1665
  REGION 1..123: note = Description of Artificial Sequence: Synthetic polypeptide
  REGION 1..123: note = Synthetic Construct

SEQ ID NO: 1701 - protein, 123 aa, synthetic construct; identical to SEQ ID NO: 1666
  REGION 1..123: note = Description of Artificial Sequence: Synthetic polypeptide
  REGION 1..123: note = Synthetic Construct

SEQ ID NO: 1702 - protein, 123 aa, synthetic construct; identical to SEQ ID NO: 1667
  REGION 1..123: note = Description of Artificial Sequence: Synthetic polypeptide
  REGION 1..123: note = Synthetic Construct

SEQ ID NO: 1703 - skipped

SEQ ID NO: 1704 - protein, 9 aa, synthetic construct
  REGION 1..9: note = Description of Artificial Sequence: Synthetic peptide
  REGION 1..9: note = Synthetic Construct
  MOD_RES 5: note = F or V
  MOD_RES 7: note = G or E
GDLWXPXES

SEQ ID NO: 1705 - protein, 21 aa, synthetic construct
  REGION 1..21: note = Description of Artificial Sequence: Synthetic peptide
  REGION 1..21: note = Synthetic Construct
MEVGWYRSPFSRVVHLYRNGK

SEQ ID NO: 1706 - protein, 110 aa, synthetic construct; identical to SEQ ID NO: 207
  REGION 1..110: note = Description of Artificial Sequence: Synthetic polypeptide
  REGION 1..110: note = Synthetic Construct

SEQ ID NO: 1707 - protein, 113 aa, synthetic construct; identical to SEQ ID NO: 3
  REGION 1..113: note = Description of Artificial Sequence: Synthetic polypeptide
  REGION 1..113: note = Synthetic Construct

SEQ ID NO: 1708 - protein, 17 aa, synthetic construct
  REGION 1..17: note = Description of Artificial Sequence: Synthetic peptide
  REGION 1..17: note = Synthetic Construct
RIYPGDGDTNYNGEFRV

SEQ ID NO: 1709 - protein, 227 aa, Mus musculus; identical to SEQ ID NO: 822

SEQ ID NO: 1710 - protein, 228 aa, Rattus norvegicus; identical to SEQ ID NO: 823

SEQ ID NO: 1711 - protein, 260 aa, Macaca mulatta; identical to SEQ ID NO: 824

SEQ ID NO: 1712 - protein, 230 aa, Macaca fascicularis
MEPLRLLILLFATELSGAHNTTVFQGVEGQSLQVSCPYDSMKHWGRRKAWCRQLGEKGPCQRVVSTHNLWLLSFLRRRNGSTAITDDTLGGTLTITLRNLQPHDAGFYQCQSLHGSEADTLRKVLVEVLADPLDHRDAGDLWVPGESESFEDAHVEHSISRSLLEGEIPFPPTSVLLLLACIFLIKILAASALWAAAWHGQKPGTHPPSEPDCGHDPGHQLQTLPGLRDT

SEQ ID NO: 1713 - protein, 230 aa, Equus caballus; identical to SEQ ID NO: 826

SEQ ID NO: 1714 - protein, 233 aa, Sus scrofa; identical to SEQ ID NO: 827

SEQ ID NO: 1715 - protein, 230 aa, Canis lupus; identical to SEQ ID NO: 828

SEQ ID NO: 1716 - protein, 26 aa, synthetic construct
  REGION 1..26: note = Description of Artificial Sequence: Synthetic peptide
  REGION 1..26: note = Synthetic Construct
QVQLVQSGAEVKKPGSSVKVSCKASG

SEQ ID NO: 1717 - protein, 26 aa, synthetic construct
  REGION 1..26: note = Description of Artificial Sequence: Synthetic peptide
  REGION 1..26: note = Synthetic Construct
EVQLVQSGAEVKKPGSSVKVSCKASG

SEQ ID NO: 1718 - protein, 26 aa, synthetic construct
  REGION 1..26: note = Description of Artificial Sequence: Synthetic peptide
  REGION 1..26: note = Synthetic Construct
QVQLVQSGAEVKKPGASVKVSCKASG

SEQ ID NO: 1719 - protein, 14 aa, synthetic construct
  REGION 1..14: note = Description of Artificial Sequence: Synthetic peptide
  REGION 1..14: note = Synthetic Construct
WVRQAPGQGLEWMG

SEQ ID NO: 1720 - protein, 14 aa, synthetic construct
  REGION 1..14: note = Description of Artificial Sequence: Synthetic peptide
  REGION 1..14: note = Synthetic Construct
WVRQAPGQRLEWIG

SEQ ID NO: 1721 - protein, 30 aa, synthetic construct
  REGION 1..30: note = Description of Artificial Sequence: Synthetic polypeptide
  REGION 1..30: note = Synthetic Construct
RVTITADESTSTAYMELSSLRSEDTAVYYC

SEQ ID NO: 1722 - protein, 30 aa, synthetic construct
  REGION 1..30: note = Description of Artificial Sequence: Synthetic polypeptide
  REGION 1..30: note = Synthetic Construct
RVTITADTSASTAYMELSSLRSEDTAVYYC

SEQ ID NO: 1723 - protein, 11 aa, synthetic construct
  REGION 1..11: note = Description of Artificial Sequence: Synthetic peptide
  REGION 1..11: note = Synthetic Construct
WGQGTLVTVSS

SEQ ID NO: 1724 - protein, 23 aa, synthetic construct
  REGION 1..23: note = Description of Artificial Sequence: Synthetic peptide
  REGION 1..23: note = Synthetic Construct
DVVMTQTPLSLSVTPGQPASISC

SEQ ID NO: 1725 - protein, 23 aa, synthetic construct
  REGION 1..23: note = Description of Artificial Sequence: Synthetic peptide
  REGION 1..23: note = Synthetic Construct
GVVMTQTPLSLSVTPGQPASISC

SEQ ID NO: 1726 - protein, 23 aa, synthetic construct
  REGION 1..23: note = Description of Artificial Sequence: Synthetic peptide
  REGION 1..23: note = Synthetic Construct
GVVMAQTPLSLSVTPGQPASISC

SEQ ID NO: 1727 - protein, 23 aa, synthetic construct
  REGION 1..23: note = Description of Artificial Sequence: Synthetic peptide
  REGION 1..23: note = Synthetic Construct
DVVMTQSPDSLAVSLGERATINC

SEQ ID NO: 1728 - protein, 15 aa, synthetic construct
  REGION 1..15: note = Description of Artificial Sequence: Synthetic peptide
  REGION 1..15: note = Synthetic Construct
WYLQKPGQSPQLLIY

SEQ ID NO: 1729 - protein, 15 aa, synthetic construct
  REGION 1..15: note = Description of Artificial Sequence: Synthetic peptide
  REGION 1..15: note = Synthetic Construct
WYQQKPGQSPKLLIY

SEQ ID NO: 1730 - protein, 32 aa, synthetic construct
  REGION 1..32: note = Description of Artificial Sequence: Synthetic polypeptide
  REGION 1..32: note = Synthetic Construct
GVPDRFSGSGSGTDFTLKISRVEAEDVGVYYC

SEQ ID NO: 1731 - protein, 32 aa, synthetic construct
  REGION 1..32: note = Description of Artificial Sequence: Synthetic polypeptide
  REGION 1..32: note = Synthetic Construct
GVPDRFSGSGSGTDFTLTISSLQAEDVAVYYC

SEQ ID NO: 1732 - protein, 10 aa, synthetic construct
  REGION 1..10: note = Description of Artificial Sequence: Synthetic peptide
  REGION 1..10: note = Synthetic Construct
FGQGTKLEIK

SEQ ID NO: 1733 - protein, 10 aa, synthetic construct
  REGION 1..10: note = Description of Artificial Sequence: Synthetic peptide
  REGION 1..10: note = Synthetic Construct
FGGGTKVEIK

SEQ ID NO: 1734 - protein, 123 aa, synthetic construct
  REGION 1..123: note = Description of Artificial Sequence: Synthetic polypeptide
  REGION 1..123: note = Synthetic Construct
QVQLVQSGAEVKKPGSSVKVSCKASGYAFSSSWMNWVRQAPGQGLEWMGRIYPGDGDTNYAQKFQGRVTITADESTSTAYMELSSLRSEDTAVYYCARLLRNQPGESYAMDYWGQGTLVTVSS

SEQ ID NO: 1735 - protein, 123 aa, synthetic construct
  REGION 1..123: note = Description of Artificial Sequence: Synthetic polypeptide
  REGION 1..123: note = Synthetic Construct
QVQLVQSGAEVKKPGSSVKVSCKASGYAFSSSWMNWVRQAPGQGLEWMGRIYPGGGDTNYAQKFQGRVTITADESTSTAYMELSSLRSEDTAVYYCARLLRNQPGESYAMDYWGQGTLVTVSS

SEQ ID NO: 1736 - protein, 123 aa, synthetic construct
  REGION 1..123: note = Description of Artificial Sequence: Synthetic polypeptide
  REGION 1..123: note = Synthetic Construct
QVQLVQSGAEVKKPGSSVKVSCKASGYAFSSSWMNWVRQAPGQGLEWMGRIYPGEGDTNYAQKFQGRVTITADESTSTAYMELSSLRSEDTAVYYCARLLRNQPGESYAMDYWGQGTLVTVSS

SEQ ID NO: 1737 - protein, 123 aa, synthetic construct
  REGION 1..123: note = Description of Artificial Sequence: Synthetic polypeptide
  REGION 1..123: note = Synthetic Construct
QVQLVQSGAEVKKPGSSVKVSCKASGYAFSSSWMNWVRQAPGQGLEWMGRIYPGQGDTNYAQKFQGRVTITADESTSTAYMELSSLRSEDTAVYYCARLLRNQPGESYAMDYWGQGTLVTVSS

SEQ ID NO: 1738 - protein, 123 aa, synthetic construct
  REGION 1..123: note = Description of Artificial Sequence: Synthetic polypeptide
  REGION 1..123: note = Synthetic Construct
QVQLVQSGAEVKKPGSSVKVSCKASGYAFSLSWMNWVRQAPGQGLEWMGRIYPGDGDTNYAQKFRGRVTITADESTSTAYMELSSLRSEDTAVYYCARLLRNQPGESYAMDYWGQGTLVTVSS

SEQ ID NO: 1739 - protein, 123 aa, synthetic construct
  REGION 1..123: note = Description of Artificial Sequence: Synthetic polypeptide
  REGION 1..123: note = Synthetic Construct
QVQLVQSGAEVKKPGSSVKVSCKASGYAFSLSWMNWVRQAPGQGLEWMGRIYPGDGDTNYARKFQGRVTITADESTSTAYMELSSLRSEDTAVYYCARLLRNQPGSSYAMDYWGQGTLVTVSS

SEQ ID NO: 1740 - protein, 123 aa, synthetic construct
  REGION 1..123: note = Description of Artificial Sequence: Synthetic polypeptide
  REGION 1..123: note = Synthetic Construct
QVQLVQSGAEVKKPGSSVKVSCKASGYAFSRSWMNWVRQAPGQGLEWMGRIYPGDGDTNYAQKFQGRVTITADESTSTAYMELSSLRSEDTAVYYCARLLRNQPGASYAMDYWGQGTLVTVSS

SEQ ID NO: 1741 - protein, 123 aa, synthetic construct
  REGION 1..123: note = Description of Artificial Sequence: Synthetic polypeptide
  REGION 1..123: note = Synthetic Construct
QVQLVQSGAEVKKPGSSVKVSCKASGYAFSSDWMNWVRQAPGQGLEWMGRIYPGDGDTNYAQKFQGRVTITADESTSTAYMELSSLRSEDTAVYYCARLLRNQPGESYAMDYWGQGTLVTVSS

SEQ ID NO: 1742 - protein, 123 aa, synthetic construct
  REGION 1..123: note = Description of Artificial Sequence: Synthetic polypeptide
  REGION 1..123: note = Synthetic Construct
QVQLVQSGAEVKKPGSSVKVSCKASGYAFSSDWMNWVRQAPGQGLEWMGRIYPGDGDTNYARKFQGRVTITADESTSTAYMELSSLRSEDTAVYYCARLLRNQPGESYAMDYWGQGTLVTVSS

SEQ ID NO: 1743 - protein, 123 aa, synthetic construct
  REGION 1..123: note = Description of Artificial Sequence: Synthetic polypeptide
  REGION 1..123: note = Synthetic Construct
QVQLVQSGAEVKKPGSSVKVSCKASGYAFSSHWMNWVRQAPGQGLEWMGRIYPGDGDTNYAHKFQGRVTITADESTSTAYMELSSLRSEDTAVYYCARLLRNQPGESYAMDYWGQGTLVTVSS

SEQ ID NO: 1744 - protein, 123 aa, synthetic construct
  REGION 1..123: note = Description of Artificial Sequence: Synthetic polypeptide
  REGION 1..123: note = Synthetic Construct
QVQLVQSGAEVKKPGSSVKVSCKASGYAFSSHWMNWVRQAPGQGLEWMGRIYPGDGDTNYAQKFKGRVTITADESTSTAYMELSSLRSEDTAVYYCARLLRNQPGESYAMDYWGQGTLVTVSS

SEQ ID NO: 1745 - protein, 123 aa, synthetic construct
  REGION 1..123: note = Description of Artificial Sequence: Synthetic polypeptide
  REGION 1..123: note = Synthetic Construct
QVQLVQSGAEVKKPGSSVKVSCKASGYAFSSHWMNWVRQAPGQGLEWMGRIYPGDGDTNYAQKFQGRVTITADESTSTAYMELSSLRSEDTAVYYCARLLRNQPGESYAMDYWGQGTLVTVSS

SEQ ID NO: 1746 - protein, 123 aa, synthetic construct
  REGION 1..123: note = Description of Artificial Sequence: Synthetic polypeptide
  REGION 1..123: note = Synthetic Construct
QVQLVQSGAEVKKPGSSVKVSCKASGYAFSSHWMNWVRQAPGQGLEWMGRIYPGDGDTNYAQKFRGRVTITADESTSTAYMELSSLRSEDTAVYYCARLLRNQPGASYAMDYWGQGTLVTVSS

SEQ ID NO: 1747 - protein, 123 aa, synthetic construct
  REGION 1..123: note = Description of Artificial Sequence: Synthetic polypeptide
  REGION 1..123: note = Synthetic Construct
QVQLVQSGAEVKKPGSSVKVSCKASGYAFSSHWMNWVRQAPGQGLEWMGRIYPGDGDTNYAQKRQGRVTITADESTSTAYMELSSLRSEDTAVYYCARLLRNQPGESYAMDYWGQGTLVTVSS

SEQ ID NO: 1748 - protein, 123 aa, synthetic construct
  REGION 1..123: note = Description of Artificial Sequence: Synthetic polypeptide
  REGION 1..123: note = Synthetic Construct
QVQLVQSGAEVKKPGSSVKVSCKASGYAFSSHWMNWVRQAPGQGLEWMGRIYPGDGDTNYAQKWQGRVTITADESTSTAYMELSSLRSEDTAVYYCARLLRNQPGSSYAMDYWGQGTLVTVSS

SEQ ID NO: 1749 - protein, 123 aa, synthetic construct
  REGION 1..123: note = Description of Artificial Sequence: Synthetic polypeptide
  REGION 1..123: note = Synthetic Construct
QVQLVQSGAEVKKPGSSVKVSCKASGYAFSSHWMNWVRQAPGQGLEWMGRIYPGDGDTNYARKFQGRVTITADESTSTAYMELSSLRSEDTAVYYCARLLRNQPGESYAMDYWGQGTLVTVSS

SEQ ID NO: 1750 - protein, 123 aa, synthetic construct
  REGION 1..123: note = Description of Artificial Sequence: Synthetic polypeptide
  REGION 1..123: note = Synthetic Construct
QVQLVQSGAEVKKPGSSVKVSCKASGYAFSSHWMNWVRQAPGQGLEWMGRIYPGDGDTNYAWKFQGRVTITADESTSTAYMELSSLRSEDTAVYYCARLLRNQPGESYAMDYWGQGTLVTVSS

SEQ ID NO: 1751 - protein, 123 aa, synthetic construct
  REGION 1..123: note = Description of Artificial Sequence: Synthetic polypeptide
  REGION 1..123: note = Synthetic Construct
QVQLVQSGAEVKKPGSSVKVSCKASGYAFSSHWMNWVRQAPGQGLEWMGRIYPGDGDTNYAYKFQGRVTITADESTSTAYMELSSLRSEDTAVYYCARLLRNQPGESYAMDYWGQGTLVTVSS

SEQ ID NO: 1752 - protein, 123 aa, synthetic construct
  REGION 1..123: note = Description of Artificial Sequence: Synthetic polypeptide
  REGION 1..123: note = Synthetic Construct
QVQLVQSGAEVKKPGSSVKVSCKASGYAFSSHWMNWVRQAPGQGLEWMGRIYPGDGQTNYAQKRQGRVTITADESTSTAYMELSSLRSEDTAVYYCARLLRNQPGESYAMDYWGQGTLVTVSS

SEQ ID NO: 1753 - protein, 123 aa, synthetic construct
  REGION 1..123: note = Description of Artificial Sequence: Synthetic polypeptide
  REGION 1..123: note = Synthetic Construct
QVQLVQSGAEVKKPGSSVKVSCKASGYAFSSHWMNWVRQAPGQGLEWMGRIYPGGGDTNYAQKFQGRVTITADESTSTAYMELSSLRSEDTAVYYCARLLRNQPGESYAMDYWGQGTLVTVSS

SEQ ID NO: 1754 - protein, 123 aa, synthetic construct
  REGION 1..123: note = Description of Artificial Sequence: Synthetic polypeptide
  REGION 1..123: note = Synthetic Construct
QVQLVQSGAEVKKPGSSVKVSCKASGYAFSSHWMNWVRQAPGQGLEWMGRIYPGGGDTNYAQKFRGRVTITADESTSTAYMELSSLRSEDTAVYYCARLLRNQPGESYAMDYWGQGTLVTVSS

SEQ ID NO: 1755 - protein, 123 aa, synthetic construct
  REGION 1..123: note = Description of Artificial Sequence: Synthetic polypeptide
  REGION 1..123: note = Synthetic Construct
QVQLVQSGAEVKKPGSSVKVSCKASGYAFSSHWMNWVRQAPGQGLEWMGRIYPGGGDTNYAQKRQGRVTITADESTSTAYMELSSLRSEDTAVYYCARLLRNQPGESYAMDYWGQGTLVTVSS

SEQ ID NO: 1756 - protein, 123 aa, synthetic construct
  REGION 1..123: note = Description of Artificial Sequence: Synthetic polypeptide
  REGION 1..123: note = Synthetic Construct
QVQLVQSGAEVKKPGSSVKVSCKASGYAFSSHWMNWVRQAPGQGLEWMGRIYPGQGDTNYAQKFQGRVTITADESTSTAYMELSSLRSEDTAVYYCARLLRNQPGESYAMDYWGQGTLVTVSS

SEQ ID NO: 1757 - protein, 123 aa, synthetic construct
  REGION 1..123: note = Description of Artificial Sequence: Synthetic polypeptide
  REGION 1..123: note = Synthetic Construct
QVQLVQSGAEVKKPGSSVKVSCKASGYAFSSHWMNWVRQAPGQGLEWMGRIYPGVGDTNYAQKFQGRVTITADESTSTAYMELSSLRSEDTAVYYCARLLRNQPGESYAMDYWGQGTLVTVSS

SEQ ID NO: 1758 - protein, 123 aa, synthetic construct
  REGION 1..123: note = Description of Artificial Sequence: Synthetic polypeptide
  REGION 1..123: note = Synthetic Construct
QVQLVQSGAEVKKPGSSVKVSCKASGYAFSSQWMNWVRQAPGQGLEWMGRIYPGDGDTNYAQKFQGRVTITADESTSTAYMELSSLRSEDTAVYYCARLLRNQPGESYAMDYWGQGTLVTVSS

SEQ ID NO: 1759 - protein, 123 aa, synthetic construct
  REGION 1..123: note = Description of Artificial Sequence: Synthetic polypeptide
  REGION 1..123: note = Synthetic Construct
QVQLVQSGAEVKKPGSSVKVSCKASGYAFSSQWMNWVRQAPGQGLEWMGRIYPGDGDTNYAWKFQGRVTITADESTSTAYMELSSLRSEDTAVYYCARLLRNQPGESYAMDYWGQGTLVTVSS

SEQ ID NO: 1760 - protein, 123 aa, synthetic construct
  REGION 1..123: note = Description of Artificial Sequence: Synthetic polypeptide
  REGION 1..123: note = Synthetic Construct
QVQLVQSGAEVKKPGSSVKVSCKASGYAFSSQWMNWVRQAPGQGLEWMGRIYPGGGDTNYARKFQGRVTITADESTSTAYMELSSLRSEDTAVYYCARLLRNQPGESYAMDYWGQGTLVTVSS

SEQ ID NO: 1761 - protein, 123 aa, synthetic construct
  REGION 1..123: note = Description of Artificial Sequence: Synthetic polypeptide
  REGION 1..123: note = Synthetic Construct
QVQLVQSGAEVKKPGSSVKVSCKASGYAFSSEWMNWVRQAPGQGLEWMGRIYPGDGDTNYAQKFQGRVTITADESTSTAYMELSSLRSEDTAVYYCARLLRNQPGESYAMDYWGQGTLVTVSS

SEQ ID NO: 1762 - protein, 123 aa, synthetic construct
  REGION 1..123: note = Description of Artificial Sequence: Synthetic polypeptide
  REGION 1..123: note = Synthetic Construct
EVQLVQSGAEVKKPGSSVKVSCKASGYAFSSSWMNWVRQAPGQGLEWMGRIYPGDGDTNYAQKFQGRVTITADESTSTAYMELSSLRSEDTAVYYCARLLRNQPGESYAMDYWGQGTLVTVSS

SEQ ID NO: 1763 - protein, 123 aa, synthetic construct
  REGION 1..123: note = Description of Artificial Sequence: Synthetic polypeptide
  REGION 1..123: note = Synthetic Construct
QVQLVQSGAEVKKPGASVKVSCKASGYAFSSSWMNWVRQAPGQRLEWIGRIYPGDGDTNYAQKFQGRVTITADTSASTAYMELSSLRSEDTAVYYCARLLRNQPGESYAMDYWGQGTLVTVSS

SEQ ID NO: 1764 - protein, 123 aa, synthetic construct
  REGION 1..123: note = Description of Artificial Sequence: Synthetic polypeptide
  REGION 1..123: note = Synthetic Construct
QVQLVQSGAEVKKPGASVKVSCKASGYAFWSSWMNWVRQAPGQRLEWIGRIYPGDGDTNYAQKFQGRVTITADTSASTAYMELSSLRSEDTAVYYCARLLRNQPGESYAHDYWGQGTLVTVSS

SEQ ID NO: 1765 - protein, 123 aa, synthetic construct
  REGION 1..123: note = Description of Artificial Sequence: Synthetic polypeptide
  REGION 1..123: note = Synthetic Construct
QVQLVQSGAEVKKPGASVKVSCKASGYAFSSSWMNWVRQAPGQRLEWIGRIYPGDGDTNYARKFQGRVTITADTSASTAYMELSSLRSEDTAVYYCARLLRNQPGASYAMDYWGQGTLVTVSS

SEQ ID NO: 1766 - protein, 123 aa, synthetic construct
  REGION 1..123: note = Description of Artificial Sequence: Synthetic polypeptide
  REGION 1..123: note = Synthetic Construct
QVQLVQSGAEVKKPGASVKVSCKASGYAFSSQWMNWVRQAPGQRLEWIGRIYPGGGDTNYAGKFQGRVTITADTSASTAYMELSSLRSEDTAVYYCARLLRNQPGESYAMDYWGQGTLVTVSS

SEQ ID NO: 1767 - protein, 123 aa, synthetic construct
  REGION 1..123: note = Description of Artificial Sequence: Synthetic polypeptide
  REGION 1..123: note = Synthetic Construct
QVQLVQSGAEVKKPGSSVKVSCKASGYAFSSHWMNWVRQAPGQGLEWMGRIYPGGGDTNYAQKFRGRVTITADESTSTAYMELSSLRSEDTAVYYCARLLRNQPGASYAMDYWGQGTLVTVSS

SEQ ID NO: 1768 - protein, 123 aa, synthetic construct
  REGION 1..123: note = Description of Artificial Sequence: Synthetic polypeptide
  REGION 1..123: note = Synthetic Construct
QVQLVQSGAEVKKPGSSVKVSCKASGYAFSSHWMNWVRQAPGQGLEWMGRIYPGEGDTNYAQKFRGRVTITADESTSTAYMELSSLRSEDTAVYYCARLLRNQPGASYAMDYWGQGTLVTVSS

SEQ ID NO: 1769 - protein, 123 aa, synthetic construct
  REGION 1..123: note = Description of Artificial Sequence: Synthetic polypeptide
  REGION 1..123: note = Synthetic Construct
QVQLVQSGAEVKKPGSSVKVSCKASGYAFSSHWMNWVRQAPGQGLEWMGRIYPGGGDTNYARKFRGRVTITADESTSTAYMELSSLRSEDTAVYYCARLLRNQPGASYAMDYWGQGTLVTVSS

SEQ ID NO: 1770 - protein, 123 aa, synthetic construct
  REGION 1..123: note = Description of Artificial Sequence: Synthetic polypeptide
  REGION 1..123: note = Synthetic Construct
QVQLVQSGAEVKKPGSSVKVSCKASGYAFSSDWMNWVRQAPGQGLEWMGRIYPGEGDTNYARKFQGRVTITADESTSTAYMELSSLRSEDTAVYYCARLLRNKPGESYAMDYWGQGTLVTVSS

SEQ ID NO: 1771 - protein, 123 aa, synthetic construct
  REGION 1..123: note = Description of Artificial Sequence: Synthetic polypeptide
  REGION 1..123: note = Synthetic Construct
QVQLVQSGAEVKKPGSSVKVSCKASGYAFSSDWMNWVRQAPGQGLEWMGRIYPGEGDTNYARKFHGRVTITADESTSTAYMELSSLRSEDTAVYYCARLLRNKPGESYAMDYWGQGTLVTVSS

SEQ ID NO: 1772 - protein, 123 aa, synthetic construct
  REGION 1..123: note = Description of Artificial Sequence: Synthetic polypeptide
  REGION 1..123: note = Synthetic Construct
EVQLVQSGAEVKKPGSSVKVSCKASGYAFSSDWMNWVRQAPGQGLEWMGRIYPGEGDTNYARKFHGRVTITADESTSTAYMELSSLRSEDTAVYYCARLLRNKPGESYAMDYWGQGTLVTVSS

SEQ ID NO: 1773 - protein, 123 aa, synthetic construct
  REGION 1..123: note = Description of Artificial Sequence: Synthetic polypeptide
  REGION 1..123: note = Synthetic Construct
QVQLVQSGAEVKKPGSSVKVSCKASGYAFSSHWMNWVRQAPGQGLEWMGRIYPGEGDTNYAQKFHGRVTITADESTSTAYMELSSLRSEDTAVYYCARLLRNQPGESYAMDYWGQGTLVTVSS

SEQ ID NO: 1774 - protein, 123 aa, synthetic construct
  REGION 1..123: note = Description of Artificial Sequence: Synthetic polypeptide
  REGION 1..123: note = Synthetic Construct
EVQLVQSGAEVKKPGSSVKVSCKASGYAFSSHWMNWVRQAPGQGLEWMGRIYPGEGDTNYAQKFHGRVTITADESTSTAYMELSSLRSEDTAVYYCARLLRNQPGESYAMDYWGQGTLVTVSS

SEQ ID NO: 1775 - protein, 123 aa, synthetic construct
  REGION 1..123: note = Description of Artificial Sequence: Synthetic polypeptide
  REGION 1..123: note = Synthetic Construct
QVQLVQSGAEVKKPGSSVKVSCKASGYAFSSHWMNWVRQAPGQGLEWMGRIYPGEGDTNYAQKFHGRVTITADESTSTAYMELSSLRSEDTAVYYCARLLRNKPGESYAMDYWGQGTLVTVSS

SEQ ID NO: 1776 - protein, 123 aa, synthetic construct
  REGION 1..123: note = Description of Artificial Sequence: Synthetic polypeptide
  REGION 1..123: note = Synthetic Construct
EVQLVQSGAEVKKPGSSVKVSCKASGYAFSSHWMNWVRQAPGQGLEWMGRIYPGEGDTNYAQKFHGRVTITADESTSTAYMELSSLRSEDTAVYYCARLLRNKPGESYAMDYWGQGTLVTVSS

SEQ ID NO: 1777 - protein, 123 aa, synthetic construct
  REGION 1..123: note = Description of Artificial Sequence: Synthetic polypeptide
  REGION 1..123: note = Synthetic Construct
QVQLVQSGAEVKKPGSSVKVSCKASGYAFSSQWMNWVRQAPGQGLEWMGRIYPGEGDTNYARKFQGRVTITADESTSTAYMELSSLRSEDTAVYYCARLLRNQPGESYAMDYWGQGTLVTVSS

SEQ ID NO: 1778 - protein, 123 aa, synthetic construct
  REGION 1..123: note = Description of Artificial Sequence: Synthetic polypeptide
  REGION 1..123: note = Synthetic Construct
QVQLVQSGAEVKKPGASVKVSCKASGYAFSSQWMNWVRQAPGQRLEWIGRIYPGEGDTNYAGKFQGRVTITADTSASTAYMELSSLRSEDTAVYYCARLLRNQPGESYAMDYWGQGTLVTVSS

SEQ ID NO: 1779 - protein, 123 aa, synthetic construct
  REGION 1..123: note = Description of Artificial Sequence: Synthetic polypeptide
  REGION 1..123: note = Synthetic Construct
QVQLVQSGAEVKKPGSSVKVSCKASGYAFSSSWMNWVRQAPGQGLEWMGRIYPGDGDTNYAQKFQGRATITADTSTSTAYMELSSLRSEDTAVYYCARLLRNQPGESYAMDYWGQGTLVTVSS

SEQ ID NO: 1780 - protein, 123 aa, synthetic construct; identical to SEQ ID NO: 1665
  REGION 1..123: note = Description of Artificial Sequence: Synthetic polypeptide
  REGION 1..123: note = Synthetic Construct

SEQ ID NO: 1781 - protein, 123 aa, synthetic construct; identical to SEQ ID NO: 1666
  REGION 1..123: note = Description of Artificial Sequence: Synthetic polypeptide
  REGION 1..123: note = Synthetic Construct

SEQ ID NO: 1782 - protein, 123 aa, synthetic construct; identical to SEQ ID NO: 1667
  REGION 1..123: note = Description of Artificial Sequence: Synthetic polypeptide
  REGION 1..123: note = Synthetic Construct

SEQ ID NO: 1783 - protein, 123 aa, synthetic construct
  REGION 1..123: note = Description of Artificial Sequence: Synthetic polypeptide
  REGION 1..123: note = Synthetic Construct
QVQLVQSGAEVVKPGASLKISCKASGYAFSSSWMNWVRQAPGQGLEWIGRIYPGDGDTNYNQKFQGRATLTADTSTSTAYMELSSLRSEDTAVYFCARLLRNQPGESYAMDYWGQGALVTVSS

SEQ ID NO: 1784 - protein, 123 aa, synthetic construct
  REGION 1..123: note = Description of Artificial Sequence: Synthetic polypeptide
  REGION 1..123: note = Synthetic Construct
QVQLVQSGAEVKKPGASLKISCKASGYAFSSSWMNWVRQAPGQGLEWIGRIYPGDGDTNYNGEFRVRATLTADTSTSTAYMELSSLRSEDTAVYYCARLLRNQPGESYAMDYWGQGALVTVSS

SEQ ID NO: 1785 - protein, 123 aa, synthetic construct
  REGION 1..123: note = Description of Artificial Sequence: Synthetic polypeptide
  REGION 1..123: note = Synthetic Construct
QVQLVQSGAEVKKPGASVKVSCKASGYAFSSSWMNWVRQAPGQGLEWIGRIYPGDGDTNYNGEFRVRATLTADTSTSTAYMELSSLRSEDTAVYFCARLLRNQPGESYAMDYWGQGTLVTVSS

SEQ ID NO: 1786 - protein, 123 aa, synthetic construct
  REGION 1..123: note = Description of Artificial Sequence: Synthetic polypeptide
  REGION 1..123: note = Synthetic Construct
QVQLVQSGAEVKKPGASVKVSCKASGYAFSSSWMNWVRQAPGQGLEWIGRIYPGDGDTNYAQKFQGRATLTADTSTSTAYMELSSLRSEDTAVYFCARLLRNQPGESYAMDYWGQGTLVTVSS

SEQ ID NO: 1787 - protein, 123 aa, synthetic construct
  REGION 1..123: note = Description of Artificial Sequence: Synthetic polypeptide
  REGION 1..123: note = Synthetic Construct
QVQLVQSGAEVKKPGASVKVSCKASGYAFSSSWMNWVRQAPGQGLEWIGRIYPGDGDTNYAQKFQGRATMTADTSTSTAYMELSSLRSEDTAVYYCARLLRNQPGESYAMDYWGQGTLVTVSS

SEQ ID NO: 1788 - protein, 123 aa, synthetic construct
  REGION 1..123: note = Description of Artificial Sequence: Synthetic polypeptide
  REGION 1..123: note = Synthetic Construct
QVQLVQSGAEVKKPGASVKVSCKASGYAFSSSWMNWVRQAPGQGLEWMGRIYPGDGDTNYAQKFQGRVTMTADTSTSTAYMELSSLRSEDTAVYYCARLLRNQPGESYAMDYWGQGTLVTVSS

SEQ ID NO: 1789 - protein, 123 aa, synthetic construct
  REGION 1..123: note = Description of Artificial Sequence: Synthetic polypeptide
  REGION 1..123: note = Synthetic Construct
QVQLVQSGAEVKKPGSSVKVSCKASGYAFSSSWMNWVRQAPGQGLEWIGRIYPGDGDTNYNGEFRVRATLTADTSTTTAYMELSSLRSEDTAVYFCARLLRNQPGESYAMDYWGQGTLVTVSS

SEQ ID NO: 1790 - protein, 123 aa, synthetic construct
  REGION 1..123: note = Description of Artificial Sequence: Synthetic polypeptide
  REGION 1..123: note = Synthetic Construct
QVQLVQSGAEVKKPGSSVKVSCKASGYAFSSSWMNWVRQAPGQGLEWIGRIYPGDGDTNYAQKFQGRATLTADTSTTTAYMELSSLRSEDTAVYFCARLLRNQPGESYAMDYWGQGTLVTVSS

SEQ ID NO: 1791 - protein, 123 aa, synthetic construct
  REGION 1..123: note = Description of Artificial Sequence: Synthetic polypeptide
  REGION 1..123: note = Synthetic Construct
QVQLVQSGAEVKKPGSSVKVSCKASGYAFSSSWMNWVRQAPGQGLEWIGRIYPGDGDTNYAQKFQGRATITADTSTSTAYMELSSLRSEDTAVYFCARLLRNQPGESYAMDYWGQGTLVTVSS

SEQ ID NO: 1792 - protein, 123 aa, synthetic construct
  REGION 1..123: note = Description of Artificial Sequence: Synthetic polypeptide
  REGION 1..123: note = Synthetic Construct
EVQLLESGGGLVQPGGSLRLSCAASGYAFSSSWMNWVRQAPGKGLEWIGRIYPGDGDTNYAQKFQGRATISADTSKNTAYLQMNSLRAEDTAVYYCARLLRNQPGESYAMDYWGQGTLVTVSS

SEQ ID NO: 1793 - protein, 123 aa, synthetic construct
  REGION 1..123: note = Description of Artificial Sequence: Synthetic polypeptide
  REGION 1..123: note = Synthetic Construct
QVQLVQSGAEVKKPGASVKVSCKASGYAFSSSWMNWVRQAPGQRLEWMGRIYPGDGDTNYAQKFQGRVTITRDTSASTAYMELSSLRSEDTAVYYCARLLRNQPGESYAMDYWGQGTLVTVSS

SEQ ID NO: 1794 - protein, 123 aa, synthetic construct
  REGION 1..123: note = Description of Artificial Sequence: Synthetic polypeptide
  REGION 1..123: note = Synthetic Construct
QVQLVQSGAEVKKPGASLKVSCKASGYAFSSSWMNWVRQAPGQRLEWIGRIYPGDGDTNYNGEFRVRATLTADTSASTAYMELSSLRSEDTAVYFCARLLRNQPGESYAMDYWGQGTLVTVSS

SEQ ID NO: 1795 - protein, 123 aa, synthetic construct
  REGION 1..123: note = Description of Artificial Sequence: Synthetic polypeptide
  REGION 1..123: note = Synthetic Construct
QVQLVQSGAEVKKPGASLKVSCKASGYAFSSSWMNWVRQAPGQRLEWIGRIYPGDGDTNYAQKFQGRATLTADTSASTAYMELSSLRSEDTAVYFCARLLRNQPGESYAMDYWGQGTLVTVSS

SEQ ID NO: 1796 - protein, 123 aa, synthetic construct
  REGION 1..123: note = Description of Artificial Sequence: Synthetic polypeptide
  REGION 1..123: note = Synthetic Construct
QVQLVQSGAEVKKPGASVKVSCKASGYAFSSSWMNWVRQAPGQGLEWMGRIYPGDGDTNYNGEFRVRVTMTRDTSTSTVYMELSSLRSEDTAVYYCARLLRNQPGESYAMDYWGQGTLVTVSS

SEQ ID NO: 1797 - protein, 123 aa, synthetic construct
  REGION 1..123: note = Description of Artificial Sequence: Synthetic polypeptide
  REGION 1..123: note = Synthetic Construct
QVQLVQSGAEVKKPGASVKVSCKASGYAFSSSWMNWVRQAPGQRLEWIGRIYPGDGDTNYAQKFQGRATITADTSASTAYMELSSLRSEDTAVYFCARLLRNQPGESYAMDYWGQGTLVTVSS

SEQ ID NO: 1798 - protein, 123 aa, synthetic construct
  REGION 1..123: note = Description of Artificial Sequence: Synthetic polypeptide
  REGION 1..123: note = Synthetic Construct
QVQLVQSGAEVKKPGSSVKVSCKASGYAFSSHWMNWVRQAPGQGLEWMGRIYPGEGQTNYAQKRQGRVTITADESTSTAYMELSSLRSEDTAVYYCARLLRNQPGESYAMDYWGQGTLVTVSS

SEQ ID NO: 1799 - protein, 112 aa, synthetic construct; identical to SEQ ID NO: 1664
  REGION 1..112: note = Description of Artificial Sequence: Synthetic polypeptide
  REGION 1..112: note = Synthetic Construct

SEQ ID NO: 1800 - protein, 112 aa, synthetic construct
  REGION 1..112: note = Description of Artificial Sequence: Synthetic polypeptide
  REGION 1..112: note = Synthetic Construct
DVVMTQTPLSLSVTPGQPASISCRSSQSLVHSNRYTYLHWYLQKPGQSPQLLIYKVSNRFSGVPDRFSGSGSGTDFTLKISRVEAEDVGVYYCSQSTRVPYTFGQGTKLEIK

SEQ ID NO: 1801 - protein, 112 aa, synthetic construct
  REGION 1..112: note = Description of Artificial Sequence: Synthetic polypeptide
  REGION 1..112: note = Synthetic Construct
DVVMTQTPLSLSVTPGQPASISCRSSQSLVHSNWYTYLHWYLQKPGQSPQLLIYKVSNRFSGVPDRFSGSGSGTDFTLKISRVEAEDVGVYYCSQSTRVPYTFGQGTKLEIK

SEQ ID NO: 1802 - protein, 112 aa, synthetic construct
  REGION 1..112: note = Description of Artificial Sequence: Synthetic polypeptide
  REGION 1..112: note = Synthetic Construct
GVVMTQTPLSLSVTPGQPASISCRSSQSLIHSNGYTYLHWYLQKPGQSPQLLIYKVSNRRSGVPDRFSGSGSGTDFTLKISRVEAEDVGVYYCSQSTRVPYTFGQGTKLEIK

SEQ ID NO: 1803 - protein, 112 aa, synthetic construct
  REGION 1..112: note = Description of Artificial Sequence: Synthetic polypeptide
  REGION 1..112: note = Synthetic Construct
GVVMTQTPLSLSVTPGQPASISCRTSQSLVHSNGYTYLHWYLQKPGQSPQLLIYKVSNRVSGVPDRFSGSGSGTDFTLKISRVEAEDVGVYYCSQSTRVPYTFGQGTKLEIK

SEQ ID NO: 1804 - protein, 112 aa, synthetic construct
  REGION 1..112: note = Description of Artificial Sequence: Synthetic polypeptide
  REGION 1..112: note = Synthetic Construct
GVVMTQTPLSLSVTPGQPASISCRSSQSLVHSNGYTYLHWYLQKPGQSPQLLIYKVSNRRSGVPDRFSGSGSGTDFTLKISRVEAEDVGVYYCSQSTRVPYTFGQGTKLEIK

SEQ ID NO: 1805 - protein, 112 aa, synthetic construct
  REGION 1..112: note = Description of Artificial Sequence: Synthetic polypeptide
  REGION 1..112: note = Synthetic Construct
DVVMTQTPLSLSVTPGQPASISCRSSRSLVHSNGYTYLHWYLQKPGQSPQLLIYKVSNRVSGVPDRFSGSGSGTDFTLKISRVEAEDVGVYYCSQSTRVPYTFGQGTKLEIK

SEQ ID NO: 1806 - protein, 112 aa, synthetic construct
  REGION 1..112: note = Description of Artificial Sequence: Synthetic polypeptide
  REGION 1..112: note = Synthetic Construct
GVVMTQTPLSLSVTPGQPASISCRSSRSLVHSNGYTYLHWYLQKPGQSPQLLIYKVSNRFSGVPDRFSGSGSGTDFTLKISRVEAEDVGVYYCSQSTRVPYTFGQGTKLEIK

SEQ ID NO: 1807 - protein, 112 aa, synthetic construct
  REGION 1..112: note = Description of Artificial Sequence: Synthetic polypeptide
  REGION 1..112: note = Synthetic Construct
GVVMTQTPLSLSVTPGQPASISCRSSSSLVHSNGYTYLHWYLQKPGQSPQLLIYKVSNRKSGVPDRFSGSGSGTDFTLKISRVEAEDVGVYYCSQSTRVPYTFGQGTKLEIK

SEQ ID NO: 1808 - protein, 112 aa, synthetic construct
  REGION 1..112: note = Description of Artificial Sequence: Synthetic polypeptide
  REGION 1..112: note = Synthetic Construct
GVVMTQTPLSLSVTPGQPASISCRSSRSLVHSNGYTYLHWYLQKPGQSPQLLIYKVSNRRSGVPDRFSGSGSGTDFTLKISRVEAEDVGVYYCSQSTRVPYTFGQGTKLEIK

SEQ ID NO: 1809 - protein, 112 aa, synthetic construct
  REGION 1..112: note = Description of Artificial Sequence: Synthetic polypeptide
  REGION 1..112: note = Synthetic Construct
GVVMTQTPLSLSVTPGQPASISCRSSRSLVHSNGYTYLHWYLQKPGQSPQLLIYKVSNRVSGVPDRFSGSGSGTDFTLKISRVEAEDVGVYYCSQSTRVPYTFGQGTKLEIK

SEQ ID NO: 1810 - protein, 112 aa, synthetic construct
  REGION 1..112: note = Description of Artificial Sequence: Synthetic polypeptide
  REGION 1..112: note = Synthetic Construct
GVVMAQTPLSLSVTPGQPASISCRTSQSLVHSNGYTYLHWYLQKPGQSPQLLIYKVSNRVSGVPDRFSGSGSGTDFTLKISRVEAEDVGVYYCSQSTRVPYTFGQGTKLEIK

SEQ ID NO: 1811 - protein, 112 aa, synthetic construct
  REGION 1..112: note = Description of Artificial Sequence: Synthetic polypeptide
  REGION 1..112: note = Synthetic Construct
DVVMTQSPDSLAVSLGERATINCRSSQSLVHSNGYTYLHWYQQKPGQSPKLLIYKVSNRFSGVPDRFSGSGSGTDFTLTISSLQAEDVAVYYCSQSTRVPYTFGGGTKVEIK

SEQ ID NO: 1812 - protein, 112 aa, synthetic construct
  REGION 1..112: note = Description of Artificial Sequence: Synthetic polypeptide
  REGION 1..112: note = Synthetic Construct
GVVMTQTPLSLSVTPGQPASISCRSSRSLVHSNRYTYLHWYLQKPGQSPQLLIYKVSNRRSGVPDRFSGSGSGTDFTLKISRVEAEDVGVYYCSQSTRVPYTFGQGTKLEIK

SEQ ID NO: 1813 - protein, 112 aa, synthetic construct
  REGION 1..112: note = Description of Artificial Sequence: Synthetic polypeptide
  REGION 1..112: note = Synthetic Construct
GVVMTQTPLSLSVTPGQPASISCRSSRSLVHSNQYTYLHWYLQKPGQSPQLLIYKVSNRRSGVPDRFSGSGSGTDFTLKISRVEAEDVGVYYCSQSTRVPYTFGQGTKLEIK

SEQ ID NO: 1814 - protein, 112 aa, synthetic construct
  REGION 1..112: note = Description of Artificial Sequence: Synthetic polypeptide
  REGION 1..112: note = Synthetic Construct
GVVMTQTPLSLSVTPGQPASISCRTSRSLVHSNRYTYLHWYLQKPGQSPQLLIYKVSNRRSGVPDRFSGSGSGTDFTLKISRVEAEDVGVYYCSQSTRVPYTFGQGTKLEIK

SEQ ID NO: 1815 - protein, 112 aa, synthetic construct
  REGION 1..112: note = Description of Artificial Sequence: Synthetic polypeptide
  REGION 1..112: note = Synthetic Construct
DVVMTQTPLSLSVTPGQPASISCRTSQSLVHSNAYTYLHWYLQKPGQSPQLLIYKVSNRVSGVPDRFSGSGSGTDFTLKISRVEAEDVGVYYCSQSTRVPYTFGQGTKLEIK

SEQ ID NO: 1816 - protein, 112 aa, synthetic construct
  REGION 1..112: note = Description of Artificial Sequence: Synthetic polypeptide
  REGION 1..112: note = Synthetic Construct
DVVMTQTPLSLSVTPGQPASISCRTSQSLVHSNQYTYLHWYLQKPGQSPQLLIYKVSNRVSGVPDRFSGSGSGTDFTLKISRVEAEDVGVYYCSQSTRVPYTFGQGTKLEIK

SEQ ID NO: 1817 - protein, 112 aa, synthetic construct
  REGION 1..112: note = Description of Artificial Sequence: Synthetic polypeptide
  REGION 1..112: note = Synthetic Construct
GVVMTQTPLSLSVTPGQPASISCRSSQSLVHSNQYTYLHWYLQKPGQSPQLLIYKVSNRRSGVPDRFSGSGSGTDFTLKISRVEAEDVGVYYCSQSTRVPYTFGQGTKLEIK

SEQ ID NO: 1818 - protein, 112 aa, synthetic construct
  REGION 1..112: note = Description of Artificial Sequence: Synthetic polypeptide
  REGION 1..112: note = Synthetic Construct
DVVMTQSPDSLAVSLGERATINCRSSQSLVHSNQYTYLHWYQQKPGQSPKLLIYKVSNRFSGVPDRFSGSGSGTDFTLTISSLQAEDVAVYYCSQSTRVPYTFGGGTKVEIK

SEQ ID NO: 1819 - protein, 112 aa, synthetic construct
  REGION 1..112: note = Description of Artificial Sequence: Synthetic polypeptide
  REGION 1..112: note = Synthetic Construct
DVVMTQSPDSLAVSLGERATINCRSSQSLVHSNRYTYLHWYQQKPGQSPKLLIYKVSNRFSGVPDRFSGSGSGTDFTLKISRVEAEDVGVYYCSQSTRVPYTFGQGTKLEIK

SEQ ID NO: 1820 - protein, 112 aa, synthetic construct
  REGION 1..112: note = Description of Artificial Sequence: Synthetic polypeptide
  REGION 1..112: note = Synthetic Construct
GVVMTQTPLSLSVTPGQPASISCRSSQSLVHSNRYTYLHWYLQKPGQSPQLLIYKVSNRRSGVPDRFSGSGSGTDFTLKISRVEAEDVGVYYCSQSTRVPYTFGQGTKLEIK

SEQ ID NO: 1821 - protein, 112 aa, synthetic construct; identical to SEQ ID NO: 1663
  REGION 1..112: note = Description of Artificial Sequence: Synthetic polypeptide
  REGION 1..112: note = Synthetic Construct

SEQ ID NO: 1822 - protein, 112 aa, synthetic construct
  REGION 1..112: note = Description of Artificial Sequence: Synthetic polypeptide
  REGION 1..112: note = Synthetic Construct
DVVMTQTPLSLSVTPGQPASISCRSSQSLVHSNGYTYLHWYLQKPGQSPQLLIYKVSNRFSGVPDRFSGSGSGTDFTLKISRVEAEDLGVYFCSQSTRVPYTFGQGTKLEIK

SEQ ID NO: 1823 - protein, 112 aa, synthetic construct
  REGION 1..112: note = Description of Artificial Sequence: Synthetic polypeptide
  REGION 1..112: note = Synthetic Construct
DIVMTQSPLSLPVTPGEPASISCRSSQSLVHSNGYTYLHWYLQKPGQSPQLLIYKVSNRFSGVPDRFSGSGSGTDFTLKISRVEAEDVGVYYCSQSTRVPYTFGGGTKVEIK

SEQ ID NO: 1824 - protein, 112 aa, synthetic construct
  REGION 1..112: note = Description of Artificial Sequence: Synthetic polypeptide
  REGION 1..112: note = Synthetic Construct
DVQMTQSPSSLSASVGDRVTITCRSSQSLVHSNGYTYLHWYQQKPGKSPKLLIYKVSNRFSGVPSRFSGSGSGTDFTLTISSLQPEDFATYYCSQSTRVPYTFGGGTKVEIK

SEQ ID NO: 1825 - protein, 112 aa, synthetic construct
  REGION 1..112: note = Description of Artificial Sequence: Synthetic polypeptide
  REGION 1..112: note = Synthetic Construct
GVVMTQTPLSLSVTPGQPASISCRTSQSLVHSNQYTYLHWYLQKPGQSPQLLIYKVSNRVSGVPDRFSGSGSGTDFTLKISRVEAEDVGVYYCSQSTRVPYTFGQGTKLEIK

SEQ ID NO: 1826 - protein, 123 aa, synthetic construct; identical to SEQ ID NO: 1341
  REGION 1..123: note = Description of Artificial Sequence: Synthetic polypeptide
  REGION 1..123: note = Synthetic Construct

SEQ ID NO: 1827 - protein, 112 aa, synthetic construct; identical to SEQ ID NO: 1670
  REGION 1..112: note = Description of Artificial Sequence: Synthetic polypeptide
  REGION 1..112: note = Synthetic Construct

SEQ ID NO: 1828 - protein, 9 aa, synthetic construct
  REGION 1..9: note = Description of Artificial Sequence: Synthetic peptide
  REGION 1..9: note = Synthetic Construct
  MOD_RES 4: note = Ser or Trp
  MOD_RES 5: note = Ser, Leu, or Arg
  MOD_RES 6: note = Ser, Asp, His, Gln, or Glu
YAFXXXWMN

SEQ ID NO: 1829 - protein, 17 aa, synthetic construct
  REGION 1..17: note = Description of Artificial Sequence: Synthetic peptide
  REGION 1..17: note = Synthetic Construct
  MOD_RES 6: note = Asp, Gly, Glu, Gln, or Val
  MOD_RES 8: note = Asp or Gln
  MOD_RES 13: note = Gln, Arg, His, Trp, Tyr, or Gly
  MOD_RES 15: note = Phe, Arg, or Trp
  MOD_RES 16: note = Gln, Arg, Lys, or His
RIYPGXGXTNYAXKXXG

SEQ ID NO: 1830 - protein, 16 aa, synthetic construct
  REGION 1..16: note = Description of Artificial Sequence: Synthetic peptide
  REGION 1..16: note = Synthetic Construct
  MOD_RES 7: note = Gln or Lys
  MOD_RES 10: note = Glu, Ser, or Ala
  MOD_RES 14: note = Met or His
ARLLRNXPGXSYAXDY

SEQ ID NO: 1831 - protein, 9 aa, synthetic construct
  REGION 1..9: note = Description of Artificial Sequence: Synthetic peptide
  REGION 1..9: note = Synthetic Construct
YAFSSSWMN

SEQ ID NO: 1832 - protein, 17 aa, synthetic construct
  REGION 1..17: note = Description of Artificial Sequence: Synthetic peptide
  REGION 1..17: note = Synthetic Construct
RIYPGDGDTNYAQKFQG

SEQ ID NO: 1833 - protein, 16 aa, synthetic construct
  REGION 1..16: note = Description of Artificial Sequence: Synthetic peptide
  REGION 1..16: note = Synthetic Construct
ARLLRNQPGESYAMDY

SEQ ID NO: 1834 - protein, 16 aa, synthetic construct
  REGION 1..16: note = Description of Artificial Sequence: Synthetic peptide
  REGION 1..16: note = Synthetic Construct
  MOD_RES 2: note = Ser or Thr
  MOD_RES 4: note = Gln, Arg, or Ser
  MOD_RES 7: note = Val or Ile
  MOD_RES 11: note = Gly, Arg, Trp, Gln, or Ala
RXSXSLXHSNXYTYLH

SEQ ID NO: 1835 - protein, 7 aa, synthetic construct
  REGION 1..7: note = Description of Artificial Sequence: Synthetic peptide
  REGION 1..7: note = Synthetic Construct
  MOD_RES 6: note = Phe, Arg, Val, or Lys
KVSNRXS

SEQ ID NO: 1836 - protein, 9 aa, synthetic construct
  REGION 1..9: note = Description of Artificial Sequence: Synthetic peptide
  REGION 1..9: note = Synthetic Construct
SQSTRVPYT

SEQ ID NO: 1837 - protein, 16 aa, synthetic construct
  REGION 1..16: note = Description of Artificial Sequence: Synthetic peptide
  REGION 1..16: note = Synthetic Construct
RSSQSLVHSNGYTYLH

SEQ ID NO: 1838 - protein, 7 aa, synthetic construct
  REGION 1..7: note = Description of Artificial Sequence: Synthetic peptide
  REGION 1..7: note = Synthetic Construct
KVSNRFS

SEQ ID NO: 1839 - protein, 9 aa, synthetic construct
  REGION 1..9: note = Description of Artificial Sequence: Synthetic peptide
  REGION 1..9: note = Synthetic Construct
YAFSSQWMN

SEQ ID NO: 1840 - protein, 17 aa, synthetic construct
  REGION 1..17: note = Description of Artificial Sequence: Synthetic peptide
  REGION 1..17: note = Synthetic Construct
RIYPGGGDTNYARKFQG

SEQ ID NO: 1841 - protein, 7 aa, synthetic construct
  REGION 1..7: note = Description of Artificial Sequence: Synthetic peptide
  REGION 1..7: note = Synthetic Construct
KVSNRRS

SEQ ID NO: 1842 - protein, 17 aa, synthetic construct
  REGION 1..17: note = Description of Artificial Sequence: Synthetic peptide
  REGION 1..17: note = Synthetic Construct
RIYPGGGDTNYAGKFQG

SEQ ID NO: 1843 - protein, 9 aa, synthetic construct
  REGION 1..9: note = Description of Artificial Sequence: Synthetic peptide
  REGION 1..9: note = Synthetic Construct
YAFSSDWMN

SEQ ID NO: 1844 - protein, 17 aa, synthetic construct
  REGION 1..17: note = Description of Artificial Sequence: Synthetic peptide
  REGION 1..17: note = Synthetic Construct
RIYPGEGDTNYARKFHG

SEQ ID NO: 1845 - protein, 16 aa, synthetic construct
  REGION 1..16: note = Description of Artificial Sequence: Synthetic peptide
  REGION 1..16: note = Synthetic Construct
ARLLRNKPGESYAMDY

SEQ ID NO: 1846 - protein, 16 aa, synthetic construct
  REGION 1..16: note = Description of Artificial Sequence: Synthetic peptide
  REGION 1..16: note = Synthetic Construct
RTSQSLVHSNAYTYLH

SEQ ID NO: 1847 - protein, 7 aa, synthetic construct
  REGION 1..7: note = Description of Artificial Sequence: Synthetic peptide
  REGION 1..7: note = Synthetic Construct
KVSNRVS

SEQ ID NO: 1848 - protein, 17 aa, synthetic construct
  REGION 1..17: note = Description of Artificial Sequence: Synthetic peptide
  REGION 1..17: note = Synthetic Construct
RIYPGEGDTNYARKFQG

SEQ ID NO: 1849 - protein, 16 aa, synthetic construct
  REGION 1..16: note = Description of Artificial Sequence: Synthetic peptide
  REGION 1..16: note = Synthetic Construct
RSSQSLVHSNQYTYLH

SEQ ID NO: 1850 - protein, 17 aa, synthetic construct
  REGION 1..17: note = Description of Artificial Sequence: Synthetic peptide
  REGION 1..17: note = Synthetic Construct
RIYPGEGDTNYAGKFQG

SEQ ID NO: 1851 - protein, 16 aa, synthetic construct
  REGION 1..16: note = Description of Artificial Sequence: Synthetic peptide
  REGION 1..16: note = Synthetic Construct
RSSQSLVHSNRYTYLH

SEQ ID NO: 1852 - protein, 110 aa, Homo sapiens; identical to SEQ ID NO: 207

SEQ ID NO: 1853 - protein, 330 aa, Homo sapiens [sequence omitted]

SEQ ID NO: 1854 - protein, 330 aa, synthetic construct
  REGION 1..330: note = Description of Artificial Sequence: Synthetic polypeptide
  REGION 1..330: note = Synthetic Construct
ASTKGPSVFPLAPSSKSTSGGTAALGCLVKDYFPEPVTVSWNSGALTSGVHTFPAVLQSSGLYSLSSVVTVPSSSLGTQTYICNVNHKPSNTKVDKKVEPKSCDKTHTCPPCPAPELLGGPSVFLFPPKPKDTLMISRTPEVTCVVVDVSHEDPEVKFNWYVDGVEVHNAKTKPREEQYNSTYRVVSVLTVLHQDWLNGKEYKCKVSNKALPAPIEKTISKAKGQPREPQVYTLPPSRDELTKNQVSLTCLVKGFYPSDIAVEWESNGQPENNYKTTPPVLDSDGSFFLYSKLTVDKSRWQQGNVFSCSVMHGALHNHYTQKSLSLSPGK

SEQ ID NO: 1855 - protein, 330 aa, synthetic construct
  REGION 1..330: note = Description of Artificial Sequence: Synthetic polypeptide
  REGION 1..330: note = Synthetic Construct
ASTKGPSVFPLAPSSKSTSGGTAALGCLVKDYFPEPVTVSWNSGALTSGVHTFPAVLQSSGLYSLSSVVTVPSSSLGTQTYICNVNHKPSNTKVDKKVEPKSCDKTHTCPPCPAPEAAGGPSVFLFPPKPKDTLMISRTPEVTCVVVDVSHEDPEVKFNWYVDGVEVHNAKTKPREEQYNSTYRVVSVLTVLHQDWLNGKEYKCKVSNKALPASIEKTISKAKGQPREPQVYTLPPSRDELTKNQVSLTCLVKGFYPSDIAVEWESNGQPENNYKTTPPVLDSDGSFFLYSKLTVDKSRWQQGNVFSCSVMHEALHNHYTQKSLSLSPGK

SEQ ID NO: 1856 - protein, 330 aa, synthetic construct
  REGION 1..330: note = Description of Artificial Sequence: Synthetic polypeptide
  REGION 1..330: note = Synthetic Construct
ASTKGPSVFPLAPSSKSTSGGTAALGCLVKDYFPEPVTVSWNSGALTSGVHTFPAVLQSSGLYSLSSVVTVPSSSLGTQTYICNVNHKPSNTKVDKKVEPKSCDKTHTCPPCPAPEAAGGPSVFLFPPKPKDTLMISRTPEVTCVVVDVSHEDPEVKFNWYVDGVEVHNAKTKPREEQYNSTYRVVSVLTVLHQDWLNGKEYKCKVSNKALPASIEKTISKAKGQPREPQVYTLPPSRDELTKNQVSLTCLVKGFYPSDIAVEWESNGQPENNYKTTPPVLDSDGSFFLYSKLTVDKSRWQQGNVFSCSVMHGALHNHYTQKSLSLSPGK

SEQ ID NO: 1857 - protein, 330 aa, synthetic construct
  REGION 1..330: note = Description of Artificial Sequence: Synthetic polypeptide
  REGION 1..330: note = Synthetic Construct
ASTKGPSVFPLAPSSKSTSGGTAALGCLVKDYFPEPVTVSWNSGALTSGVHTFPAVLQSSGLYSLSSVVTVPSSSLGTQTYICNVNHKPSNTKVDKKVEPKSCDKTHTCPPCPAPELLGGPSVFLFPPKPKDTLMISRTPEVTCVVVDVSHEDPEVKFNWYVDGVEVHNAKTKPREEQYNSTYRVVSVLTVLHQDWLNGKEYKCAVSNKALPAPIEKTISKAKGQPREPQVYTLPPSRDELTKNQVSLTCLVKGFYPSDIAVEWESNGQPENNYKTTPPVLDSDGSFFLYSKLTVDKSRWQQGNVFSCSVMHGALHNHYTQKSLSLSPGK

SEQ ID NO: 1858 - protein, 330 aa, synthetic construct
  REGION 1..330: note = Description of Artificial Sequence: Synthetic polypeptide
  REGION 1..330: note = Synthetic Construct
ASTKGPSVFPLAPSSKSTSGGTAALGCLVKDYFPEPVTVSWNSGALTSGVHTFPAVLQSSGLYSLSSVVTVPSSSLGTQTYICNVNHKPSNTKVDKKVEPKSCDKTHTCPPCPAPELLGGPSVFLFPPKPKDTLMISRTPEVTCVVVDVSHEDPEVKFNWYVDGVEVHNAKTKPREEQYNSTYRVVSVLTVLHQDWLNGKEYKCKVSNKALPASIEKTISKAKGQPREPQVYTLPPSRDELTKNQVSLTCLVKGFYPSDIAVEWESNGQPENNYKTTPPVLDSDGSFFLYSKLTVDKSRWQQGNVFSCSVMHGALHNHYTQKSLSLSPGK

SEQ ID NO: 1859 - protein, 330 aa, synthetic construct
  REGION 1..330: note = Description of Artificial Sequence: Synthetic polypeptide
  REGION 1..330: note = Synthetic Construct
ASTKGPSVFPLAPSSKSTSGGTAALGCLVKDYFPEPVTVSWNSGALTSGVHTFPAVLQSSGLYSLSSVVTVPSSSLGTQTYICNVNHKPSNTKVDKKVEPKSCDKTHTCPPCPAPELLGGPSVFLFPPKPKDTLMISRTPEVTCVVVDVSHEDPEVKFNWYVDGVEVHNAKTKPREEQYNSTYRVVSVLTVLHQDWLNGKEYKCKVSNKALPSSIEKTISKAKGQPREPQVYTLPPSRDELTKNQVSLTCLVKGFYPSDIAVEWESNGQPENNYKTTPPVLDSDGSFFLYSKLTVDKSRWQQGNVFSCSVMHGALHNHYTQKSLSLSPGK

SEQ ID NO: 1860 - protein, 330 aa, synthetic construct
  REGION 1..330: note = Description of Artificial Sequence: Synthetic polypeptide
  REGION 1..330: note = Synthetic Construct
ASTKGPSVFPLAPSSKSTSGGTAALGCLVKDYFPEPVTVSWNSGALTSGVHTFPAVLQSSGLYSLSSVVTVPSSSLGTQTYICNVNHKPSNTKVDKKVEPKSCDKTHTCPPCPAPELLGGPSVFLFPPKPKDTLMISRTPEVTCVVVDVSHEDPEVKFNWYVDGVEVHNAKTKPREEQYNSTYRVVSVLTVLHQDWLNGKEYKCAVSNKALPASIEKTISKAKGQPREPQVYTLPPSRDELTKNQVSLTCLVKGFYPSDIAVEWESNGQPENNYKTTPPVLDSDGSFFLYSKLTVDKSRWQQGNVFSCSVMHGALHNHYTQKSLSLSPGK

SEQ ID NO: 1861 - protein, 326 aa, Homo sapiens; identical to SEQ ID NO: 204

SEQ ID NO: 1862 - protein, 326 aa, synthetic construct
  REGION 1..326: note = Description of Artificial Sequence: Synthetic polypeptide
  REGION 1..326: note = Synthetic Construct
ASTKGPSVFPLAPCSRSTSESTAALGCLVKDYFPEPVTVSWNSGALTSGVHTFPAVLQSSGLYSLSSVVTVPSSNFGTQTYTCNVDHKPSNTKVDKTVERKCCVECPPCPAPPVAGPSVFLFPPKPKDTLMISRTPEVTCVVVDVSHEDPEVQFNWYVDGVEVHNAKTKPREEQFNSTFRVVSVLTVVHQDWLNGKEYKCKVSNKGLPAPIEKTISKTKGQPREPQVYTLPPSREEMTKNQVSLTCLVKGFYPSDIAVEWESNGQPENNYKTTPPMLDSDGSFFLYSKLTVDKSRWQQGNVFSCSVMHGALHNHYTQKSLSLSPGK

SEQ ID NO: 1863 - protein, 326 aa, synthetic construct
  REGION 1..326: note = Description of Artificial Sequence: Synthetic polypeptide
  REGION 1..326: note = Synthetic Construct
ASTKGPSVFPLAPCSRSTSESTAALGCLVKDYFPEPVTVSWNSGALTSGVHTFPAVLQSSGLYSLSSVVTVPSSNFGTQTYTCNVDHKPSNTKVDKTVERKCCVECPPCPAPPVAGPSVFLFPPKPKDTLMISRTPEVTCVVVDVSHEDPEVQFNWYVDGVEVHNAKTKPREEQFNSTFRVVSVLTVVHQDWLNGKEYKCKVSNKGLPSSIEKTISKTKGQPREPQVYTLPPSREEMTKNQVSLTCLVKGFYPSDIAVEWESNGQPENNYKTTPPMLDSDGSFFLYSKLTVDKSRWQQGNVFSCSVMHGALHNHYTQKSLSLSPGK

SEQ ID NO: 1864 - protein, 9 aa, synthetic construct
  REGION 1..9: note = Description of Artificial Sequence: Synthetic peptide
  REGION 1..9: note = Synthetic Construct
YAFSLSWMN

SEQ ID NO: 1865 - protein, 9 aa, synthetic construct
  REGION 1..9: note = Description of Artificial Sequence: Synthetic peptide
  REGION 1..9: note = Synthetic Construct
YAFSRSWMN

SEQ ID NO: 1866 - protein, 9 aa, synthetic construct
  REGION 1..9: note = Description of Artificial Sequence: Synthetic peptide
  REGION 1..9: note = Synthetic Construct
YAFSSHWMN

SEQ ID NO: 1867 - protein, 9 aa, synthetic construct
  REGION 1..9: note = Description of Artificial Sequence: Synthetic peptide
  REGION 1..9: note = Synthetic Construct
YAFSSEWMN

SEQ ID NO: 1868 - protein, 9 aa, synthetic construct
  REGION 1..9: note = Description of Artificial Sequence: Synthetic peptide
  REGION 1..9: note = Synthetic Construct
YAFWSSWMN

SEQ ID NO: 1869 - protein, 17 aa, synthetic construct
  REGION 1..17: note = Description of Artificial Sequence: Synthetic peptide
  REGION 1..17: note = Synthetic Construct
RIYPGGGDTNYAQKFQG

SEQ ID NO: 1870 - protein, 17 aa, synthetic construct
  REGION 1..17: note = Description of Artificial Sequence: Synthetic peptide
  REGION 1..17: note = Synthetic Construct
RIYPGEGDTNYAQKFQG

SEQ ID NO: 1871 - protein, 17 aa, synthetic construct
  REGION 1..17: note = Description of Artificial Sequence: Synthetic peptide
  REGION 1..17: note = Synthetic Construct
RIYPGQGDTNYAQKFQG

SEQ ID NO: 1872 - protein, 17 aa, synthetic construct
  REGION 1..17: note = Description of Artificial Sequence: Synthetic peptide
  REGION 1..17: note = Synthetic Construct
RIYPGDGDTNYAQKFRG

SEQ ID NO: 1873 - protein, 17 aa, synthetic construct
  REGION 1..17: note = Description of Artificial Sequence: Synthetic peptide
  REGION 1..17: note = Synthetic Construct
RIYPGDGDTNYARKFQG

SEQ ID NO: 1874 - protein, 17 aa, synthetic construct
  REGION 1..17: note = Description of Artificial Sequence: Synthetic peptide
  REGION 1..17: note = Synthetic Construct
RIYPGDGDTNYAHKFQG

SEQ ID NO: 1875 - protein, 17 aa, synthetic construct
  REGION 1..17: note = Description of Artificial Sequence: Synthetic peptide
  REGION 1..17: note = Synthetic Construct
RIYPGDGDTNYAQKFKG

SEQ ID NO: 1876 - protein, 17 aa, synthetic construct
  REGION 1..17: note = Description of Artificial Sequence: Synthetic peptide
  REGION 1..17: note = Synthetic Construct
RIYPGDGDTNYAQKRQG

SEQ ID NO: 1877 - protein, 17 aa, synthetic construct
  REGION 1..17: note = Description of Artificial Sequence: Synthetic peptide
  REGION 1..17: note = Synthetic Construct
RIYPGDGDTNYAQKWQG

SEQ ID NO: 1878 - protein, 17 aa, synthetic construct
  REGION 1..17: note = Description of Artificial Sequence: Synthetic peptide
  REGION 1..17: note = Synthetic Construct
RIYPGDGDTNYAWKFQG

SEQ ID NO: 1879 - protein, 17 aa, synthetic construct
  REGION 1..17: note = Description of Artificial Sequence: Synthetic peptide
  REGION 1..17: note = Synthetic Construct
RIYPGDGDTNYAYKFQG

SEQ ID NO: 1880 - protein, 17 aa, synthetic construct
  REGION 1..17: note = Description of Artificial Sequence: Synthetic peptide
  REGION 1..17: note = Synthetic Construct
RIYPGDGQTNYAQKRQG

SEQ ID NO: 1881 - protein, 17 aa, synthetic construct
  REGION 1..17: note = Description of Artificial Sequence: Synthetic peptide
  REGION 1..17: note = Synthetic Construct
RIYPGGGDTNYAQKFRG

SEQ ID NO: 1882 - protein, 17 aa, synthetic construct
  REGION 1..17: note = Description of Artificial Sequence: Synthetic peptide
  REGION 1..17: note = Synthetic Construct
RIYPGGGDTNYAQKRQG

SEQ ID NO: 1883 - protein, 17 aa, synthetic construct
  REGION 1..17: note = Description of Artificial Sequence: Synthetic peptide
  REGION 1..17: note = Synthetic Construct
RIYPGVGDTNYAQKFQG

SEQ ID NO: 1884 - protein, 17 aa, synthetic construct
  REGION 1..17: note = Description of Artificial Sequence: Synthetic peptide
  REGION 1..17: note = Synthetic Construct
RIYPGEGDTNYAQKFRG

SEQ ID NO: 1885 - protein, 17 aa, synthetic construct
  REGION 1..17: note = Description of Artificial Sequence: Synthetic peptide
  REGION 1..17: note = Synthetic Construct
RIYPGGGDTNYARKFRG

SEQ ID NO: 1886 - protein, 17 aa, synthetic construct
  REGION 1..17: note = Description of Artificial Sequence: Synthetic peptide
  REGION 1..17: note = Synthetic Construct
RIYPGEGDTNYAQKFHG

SEQ ID NO: 1887 - protein, 17 aa, synthetic construct
  REGION 1..17: note = Description of Artificial Sequence: Synthetic peptide
  REGION 1..17: note = Synthetic Construct
RIYPGEGQTNYAQKRQG

SEQ ID NO: 1888 - protein, 16 aa, synthetic construct
  REGION 1..16: note = Description of Artificial Sequence: Synthetic peptide
  REGION 1..16: note = Synthetic Construct
ARLLRNQPGSSYAMDY

SEQ ID NO: 1889 - protein, 16 aa, synthetic construct
  REGION 1..16: note = Description of Artificial Sequence: Synthetic peptide
  REGION 1..16: note = Synthetic Construct
ARLLRNQPGASYAMDY

SEQ ID NO: 1890 - protein, 16 aa, synthetic construct
  REGION 1..16: note = Description of Artificial Sequence: Synthetic peptide
  REGION 1..16: note = Synthetic Construct
ARLLRNQPGESYAHDY

SEQ ID NO: 1891 - protein, 16 aa, synthetic construct
  REGION 1..16: note = Description of Artificial Sequence: Synthetic peptide
  REGION 1..16: note = Synthetic Construct
RSSQSLVHSNWYTYLH

SEQ ID NO: 1892 - protein, 16 aa, synthetic construct
  REGION 1..16: note = Description of Artificial Sequence: Synthetic peptide
  REGION 1..16: note = Synthetic Construct
RSSQSLIHSNGYTYLH

SEQ ID NO: 1893 - protein, 16 aa, synthetic construct
  REGION 1..16: note = Description of Artificial Sequence: Synthetic peptide
  REGION 1..16: note = Synthetic Construct
RTSQSLVHSNGYTYLH

SEQ ID NO: 1894 - protein, 16 aa, synthetic construct
  REGION 1..16: note = Description of Artificial Sequence: Synthetic peptide
  REGION 1..16: note = Synthetic Construct
RSSRSLVHSNGYTYLH

SEQ ID NO: 1895 - protein, 16 aa, synthetic construct
  REGION 1..16: note = Description of Artificial Sequence: Synthetic peptide
  REGION 1..16: note = Synthetic Construct
RSSSSLVHSNGYTYLH

SEQ ID NO: 1896 - protein, 16 aa, synthetic construct
  REGION 1..16: note = Description of Artificial Sequence: Synthetic peptide
  REGION 1..16: note = Synthetic Construct
RSSRSLVHSNRYTYLH

SEQ ID NO: 1897 - protein, 16 aa, synthetic construct
  REGION 1..16: note = Description of Artificial Sequence: Synthetic peptide
  REGION 1..16: note = Synthetic Construct
RSSRSLVHSNQYTYLH

SEQ ID NO: 1898 - protein, 16 aa, synthetic construct
  REGION 1..16: note = Description of Artificial Sequence: Synthetic peptide
  REGION 1..16: note = Synthetic Construct
RTSRSLVHSNRYTYLH

SEQ ID NO: 1899 - protein, 16 aa, synthetic construct
  REGION 1..16: note = Description of Artificial Sequence: Synthetic peptide
  REGION 1..16: note = Synthetic Construct
RTSQSLVHSNQYTYLH

SEQ ID NO: 1900 - protein, 7 aa, synthetic construct
  REGION 1..7: note = Description of Artificial Sequence: Synthetic peptide
  REGION 1..7: note = Synthetic Construct
KVSNRKS

SEQ ID NO: 1901 - protein, 5 aa, synthetic construct
  REGION 1..5: note = Description of Artificial Sequence: Synthetic peptide
  REGION 1..5: note = Synthetic Construct
SQWMN

SEQ ID NO: 1902 - protein, 14 aa, synthetic construct
  REGION 1..14: note = Description of Artificial Sequence: Synthetic peptide
  REGION 1..14: note = Synthetic Construct
LLRNQPGESYAMDY

SEQ ID NO: 1903 - protein, 5 aa, synthetic construct
  REGION 1..5: note = Description of Artificial Sequence: Synthetic peptide
  REGION 1..5: note = Synthetic Construct
SDWMN

SEQ ID NO: 1904 - protein, 14 aa, synthetic construct
  REGION 1..14: note = Description of Artificial Sequence: Synthetic peptide
  REGION 1..14: note = Synthetic Construct
LLRNKPGESYAMDY

SEQ ID NO: 1905 - protein, 453 aa, synthetic construct
  REGION 1..453: note = Description of Artificial Sequence: Synthetic polypeptide
  REGION 1..453: note = Synthetic Construct
QVQLVQSGAEVKKPGASVKVSCKASGYAFSSQWMNWVRQAPGQRLEWIGRIYPGGGDTNYAGKFQGRVTITADTSASTAYMELSSLRSEDTAVYYCARLLRNQPGESYAMDYWGQGTLVTVSSASTKGPSVFPLAPSSKSTSGGTAALGCLVKDYFPEPVTVSWNSGALTSGVHTFPAVLQSSGLYSLSSVVTVPSSSLGTQTYICNVNHKPSNTKVDKKVEPKSCDKTHTCPPCPAPELLGGPSVFLFPPKPKDTLMISRTPEVTCVVVDVSHEDPEVKFNWYVDGVEVHNAKTKPREEQYNSTYRVVSVLTVLHQDWLNGKEYKCKVSNKALPAPIEKTISKAKGQPREPQVYTLPPSRDELTKNQVSLTCLVKGFYPSDIAVEWESNGQPENNYKTTPPVLDSDGSFFLYSKLTVDKSRWQQGNVFSCSVMHEALHNHYTQKSLSLSPGK

SEQ ID NO: 1906 - protein, 452 aa, synthetic construct
  REGION 1..452: note = Description of Artificial Sequence: Synthetic polypeptide
  REGION 1..452: note = Synthetic Construct
QVQLVQSGAEVKKPGASVKVSCKASGYAFSSQWMNWVRQAPGQRLEWIGRIYPGGGDTNYAGKFQGRVTITADTSASTAYMELSSLRSEDTAVYYCARLLRNQPGESYAMDYWGQGTLVTVSSASTKGPSVFPLAPSSKSTSGGTAALGCLVKDYFPEPVTVSWNSGALTSGVHTFPAVLQSSGLYSLSSVVTVPSSSLGTQTYICNVNHKPSNTKVDKKVEPKSCDKTHTCPPCPAPELLGGPSVFLFPPKPKDTLMISRTPEVTCVVVDVSHEDPEVKFNWYVDGVEVHNAKTKPREEQYNSTYRVVSVLTVLHQDWLNGKEYKCKVSNKALPAPIEKTISKAKGQPREPQVYTLPPSRDELTKNQVSLTCLVKGFYPSDIAVEWESNGQPENNYKTTPPVLDSDGSFFLYSKLTVDKSRWQQGNVFSCSVMHEALHNHYTQKSLSLSPG

SEQ ID NO: 1907 - protein, 453 aa, synthetic construct
  REGION 1..453: note = Description of Artificial Sequence: Synthetic polypeptide
  REGION 1..453: note = Synthetic Construct
QVQLVQSGAEVKKPGASVKVSCKASGYAFSSQWMNWVRQAPGQRLEWIGRIYPGGGDTNYAGKFQGRVTITADTSASTAYMELSSLRSEDTAVYYCARLLRNQPGESYAMDYWGQGTLVTVSSASTKGPSVFPLAPSSKSTSGGTAALGCLVKDYFPEPVTVSWNSGALTSGVHTFPAVLQSSGLYSLSSVVTVPSSSLGTQTYICNVNHKPSNTKVDKKVEPKSCDKTHTCPPCPAPELLGGPSVFLFPPKPKDTLMISRTPEVTCVVVDVSHEDPEVKFNWYVDGVEVHNAKTKPREEQYNSTYRVVSVLTVLHQDWLNGKEYKCKVSNKALPASIEKTISKAKGQPREPQVYTLPPSRDELTKNQVSLTCLVKGFYPSDIAVEWESNGQPENNYKTTPPVLDSDGSFFLYSKLTVDKSRWQQGNVFSCSVMHGALHNHYTQKSLSLSPGK

SEQ ID NO: 1908 - protein, 452 aa, synthetic construct
  REGION 1..452: note = Description of Artificial Sequence: Synthetic polypeptide
  REGION 1..452: note = Synthetic Construct
QVQLVQSGAEVKKPGASVKVSCKASGYAFSSQWMNWVRQAPGQRLEWIGRIYPGGGDTNYAGKFQGRVTITADTSASTAYMELSSLRSEDTAVYYCARLLRNQPGESYAMDYWGQGTLVTVSSASTKGPSVFPLAPSSKSTSGGTAALGCLVKDYFPEPVTVSWNSGALTSGVHTFPAVLQSSGLYSLSSVVTVPSSSLGTQTYICNVNHKPSNTKVDKKVEPKSCDKTHTCPPCPAPELLGGPSVFLFPPKPKDTLMISRTPEVTCVVVDVSHEDPEVKFNWYVDGVEVHNAKTKPREEQYNSTYRVVSVLTVLHQDWLNGKEYKCKVSNKALPASIEKTISKAKGQPREPQVYTLPPSRDELTKNQVSLTCLVKGFYPSDIAVEWESNGQPENNYKTTPPVLDSDGSFFLYSKLTVDKSRWQQGNVFSCSVMHGALHNHYTQKSLSLSPG

SEQ ID NO: 1909 - protein, 453 aa, synthetic construct
  REGION 1..453: note = Description of Artificial Sequence: Synthetic polypeptide
  REGION 1..453: note = Synthetic Construct
QVQLVQSGAEVKKPGSSVKVSCKASGYAFSSDWMNWVRQAPGQGLEWMGRIYPGEGDTNYARKFHGRVTITADESTSTAYMELSSLRSEDTAVYYCARLLRNKPGESYAMDYWGQGTLVTVSSASTKGPSVFPLAPSSKSTSGGTAALGCLVKDYFPEPVTVSWNSGALTSGVHTFPAVLQSSGLYSLSSVVTVPSSSLGTQTYICNVNHKPSNTKVDKKVEPKSCDKTHTCPPCPAPELLGGPSVFLFPPKPKDTLMISRTPEVTCVVVDVSHEDPEVKFNWYVDGVEVHNAKTKPREEQYNSTYRVVSVLTVLHQDWLNGKEYKCKVSNKALPAPIEKTISKAKGQPREPQVYTLPPSRDELTKNQVSLTCLVKGFYPSDIAVEWESNGQPENNYKTTPPVLDSDGSFFLYSKLTVDKSRWQQGNVFSCSVMHEALHNHYTQKSLSLSPGK

SEQ ID NO: 1910 - protein, 452 aa, synthetic construct
  REGION 1..452: note = Description of Artificial Sequence: Synthetic polypeptide
  REGION 1..452: note = Synthetic Construct
QVQLVQSGAEVKKPGSSVKVSCKASGYAFSSDWMNWVRQAPGQGLEWMGRIYPGEGDTNYARKFHGRVTITADESTSTAYMELSSLRSEDTAVYYCARLLRNKPGESYAMDYWGQGTLVTVSSASTKGPSVFPLAPSSKSTSGGTAALGCLVKDYFPEPVTVSWNSGALTSGVHTFPAVLQSSGLYSLSSVVTVPSSSLGTQTYICNVNHKPSNTKVDKKVEPKSCDKTHTCPPCPAPELLGGPSVFLFPPKPKDTLMISRTPEVTCVVVDVSHEDPEVKFNWYVDGVEVHNAKTKPREEQYNSTYRVVSVLTVLHQDWLNGKEYKCKVSNKALPAPIEKTISKAKGQPREPQVYTLPPSRDELTKNQVSLTCLVKGFYPSDIAVEWESNGQPENNYKTTPPVLDSDGSFFLYSKLTVDKSRWQQGNVFSCSVMHEALHNHYTQKSLSLSPG

SEQ ID NO: 1911 - protein, 453 aa, synthetic construct
  REGION 1..453: note = Description of Artificial Sequence: Synthetic polypeptide
  REGION 1..453: note = Synthetic Construct
QVQLVQSGAEVKKPGSSVKVSCKASGYAFSSDWMNWVRQAPGQGLEWMGRIYPGEGDTNYARKFHGRVTITADESTSTAYMELSSLRSEDTAVYYCARLLRNKPGESYAMDYWGQGTLVTVSSASTKGPSVFPLAPSSKSTSGGTAALGCLVKDYFPEPVTVSWNSGALTSGVHTFPAVLQSSGLYSLSSVVTVPSSSLGTQTYICNVNHKPSNTKVDKKVEPKSCDKTHTCPPCPAPELLGGPSVFLFPPKPKDTLMISRTPEVTCVVVDVSHEDPEVKFNWYVDGVEVHNAKTKPREEQYNSTYRVVSVLTVLHQDWLNGKEYKCKVSNKALPASIEKTISKAKGQPREPQVYTLPPSRDELTKNQVSLTCLVKGFYPSDIAVEWESNGQPENNYKTTPPVLDSDGSFFLYSKLTVDKSRWQQGNVFSCSVMHGALHNHYTQKSLSLSPGK

SEQ ID NO: 1912 - protein, 452 aa, synthetic construct
  REGION 1..452: note = Description of Artificial Sequence: Synthetic polypeptide
  REGION 1..452: note = Synthetic Construct
QVQLVQSGAEVKKPGSSVKVSCKASGYAFSSDWMNWVRQAPGQGLEWMGRIYPGEGDTNYARKFHGRVTITADESTSTAYMELSSLRSEDTAVYYCARLLRNKPGESYAMDYWGQGTLVTVSSASTKGPSVFPLAPSSKSTSGGTAALGCLVKDYFPEPVTVSWNSGALTSGVHTFPAVLQSSGLYSLSSVVTVPSSSLGTQTYICNVNHKPSNTKVDKKVEPKSCDKTHTCPPCPAPELLGGPSVFLFPPKPKDTLMISRTPEVTCVVVDVSHEDPEVKFNWYVDGVEVHNAKTKPREEQYNSTYRVVSVLTVLHQDWLNGKEYKCKVSNKALPASIEKTISKAKGQPREPQVYTLPPSRDELTKNQVSLTCLVKGFYPSDIAVEWESNGQPENNYKTTPPVLDSDGSFFLYSKLTVDKSRWQQGNVFSCSVMHGALHNHYTQKSLSLSPG

SEQ ID NO: 1913 - protein, 453 aa, synthetic construct
  REGION 1..453: note = Description of Artificial Sequence: Synthetic polypeptide
  REGION 1..453: note = Synthetic Construct
QVQLVQSGAEVKKPGSSVKVSCKASGYAFSSQWMNWVRQAPGQGLEWMGRIYPGEGDTNYARKFQGRVTITADESTSTAYMELSSLRSEDTAVYYCARLLRNQPGESYAMDYWGQGTLVTVSSASTKGPSVFPLAPSSKSTSGGTAALGCLVKDYFPEPVTVSWNSGALTSGVHTFPAVLQSSGLYSLSSVVTVPSSSLGTQTYICNVNHKPSNTKVDKKVEPKSCDKTHTCPPCPAPELLGGPSVFLFPPKPKDTLMISRTPEVTCVVVDVSHEDPEVKFNWYVDGVEVHNAKTKPREEQYNSTYRVVSVLTVLHQDWLNGKEYKCKVSNKALPAPIEKTISKAKGQPREPQVYTLPPSRDELTKNQVSLTCLVKGFYPSDIAVEWESNGQPENNYKTTPPVLDSDGSFFLYSKLTVDKSRWQQGNVFSCSVMHEALHNHYTQKSLSLSPGK

SEQ ID NO: 1914 - protein, 452 aa, synthetic construct
  REGION 1..452: note = Description of Artificial Sequence: Synthetic polypeptide
  REGION 1..452: note = Synthetic Construct
QVQLVQSGAEVKKPGSSVKVSCKASGYAFSSQWMNWVRQAPGQGLEWMGRIYPGEGDTNYARKFQGRVTITADESTSTAYMELSSLRSEDTAVYYCARLLRNQPGESYAMDYWGQGTLVTVSSASTKGPSVFPLAPSSKSTSGGTAALGCLVKDYFPEPVTVSWNSGALTSGVHTFPAVLQSSGLYSLSSVVTVPSSSLGTQTYICNVNHKPSNTKVDKKVEPKSCDKTHTCPPCPAPELLGGPSVFLFPPKPKDTLMISRTPEVTCVVVDVSHEDPEVKFNWYVDGVEVHNAKTKPREEQYNSTYRVVSVLTVLHQDWLNGKEYKCKVSNKALPAPIEKTISKAKGQPREPQVYTLPPSRDELTKNQVSLTCLVKGFYPSDIAVEWESNGQPENNYKTTPPVLDSDGSFFLYSKLTVDKSRWQQGNVFSCSVMHEALHNHYTQKSLSLSPG

SEQ ID NO: 1915 - protein, 453 aa, synthetic construct
  REGION 1..453: note = Description of Artificial Sequence: Synthetic polypeptide
  REGION 1..453: note = Synthetic Construct
QVQLVQSGAEVKKPGSSVKVSCKASGYAFSSHWMNWVRQAPGQGLEWMGRIYPGGGDTNYAQKFRGRVTITADESTSTAYMELSSLRSEDTAVYYCARLLRNQPGASYAMDYWGQGTLVTVSSASTKGPSVFPLAPSSKSTSGGTAALGCLVKDYFPEPVTVSWNSGALTSGVHTFPAVLQSSGLYSLSSVVTVPSSSLGTQTYICNVNHKPSNTKVDKKVEPKSCDKTHTCPPCPAPELLGGPSVFLFPPKPKDTLMISRTPEVTCVVVDVSHEDPEVKFNWYVDGVEVHNAKTKPREEQYNSTYRVVSVLTVLHQDWLNGKEYKCKVSNKALPAPIEKTISKAKGQPREPQVYTLPPSRDELTKNQVSLTCLVKGFYPSDIAVEWESNGQPENNYKTTPPVLDSDGSFFLYSKLTVDKSRWQQGNVFSCSVMHEALHNHYTQKSLSLSPGK

SEQ ID NO: 1916 - protein, 452 aa, synthetic construct
  REGION 1..452: note = Description of Artificial Sequence: Synthetic polypeptide
  REGION 1..452: note = Synthetic Construct
QVQLVQSGAEVKKPGSSVKVSCKASGYAFSSHWMNWVRQAPGQGLEWMGRIYPGGGDTNYAQKFRGRVTITADESTSTAYMELSSLRSEDTAVYYCARLLRNQPGASYAMDYWGQGTLVTVSSASTKGPSVFPLAPSSKSTSGGTAALGCLVKDYFPEPVTVSWNSGALTSGVHTFPAVLQSSGLYSLSSVVTVPSSSLGTQTYICNVNHKPSNTKVDKKVEPKSCDKTHTCPPCPAPELLGGPSVFLFPPKPKDTLMISRTPEVTCVVVDVSHEDPEVKFNWYVDGVEVHNAKTKPREEQYNSTYRVVSVLTVLHQDWLNGKEYKCKVSNKALPAPIEKTISKAKGQPREPQVYTLPPSRDELTKNQVSLTCLVKGFYPSDIAVEWESNGQPENNYKTTPPVLDSDGSFFLYSKLTVDKSRWQQGNVFSCSVMHEALHNHYTQKSLSLSPG

SEQ ID NO: 1917 - protein, 453 aa, synthetic construct
  REGION 1..453: note = Description of Artificial Sequence: Synthetic polypeptide
  REGION 1..453: note = Synthetic Construct
QVQLVQSGAEVKKPGSSVKVSCKASGYAFSSHWMNWVRQAPGQGLEWMGRIYPGGGDTNYARKFRGRVTITADESTSTAYMELSSLRSEDTAVYYCARLLRNQPGASYAMDYWGQGTLVTVSSASTKGPSVFPLAPSSKSTSGGTAALGCLVKDYFPEPVTVSWNSGALTSGVHTFPAVLQSSGLYSLSSVVTVPSSSLGTQTYICNVNHKPSNTKVDKKVEPKSCDKTHTCPPCPAPELLGGPSVFLFPPKPKDTLMISRTPEVTCVVVDVSHEDPEVKFNWYVDGVEVHNAKTKPREEQYNSTYRVVSVLTVLHQDWLNGKEYKCKVSNKALPAPIEKTISKAKGQPREPQVYTLPPSRDELTKNQVSLTCLVKGFYPSDIAVEWESNGQPENNYKTTPPVLDSDGSFFLYSKLTVDKSRWQQGNVFSCSVMHEALHNHYTQKSLSLSPGK

SEQ ID NO: 1918 - protein, 452 aa, synthetic construct
  REGION 1..452: note = Description of Artificial Sequence: Synthetic polypeptide
  REGION 1..452: note = Synthetic Construct
QVQLVQSGAEVKKPGSSVKVSCKASGYAFSSHWMNWVRQAPGQGLEWMGRIYPGGGDTNYARKFRGRVTITADESTSTAYMELSSLRSEDTAVYYCARLLRNQPGASYAMDYWGQGTLVTVSSASTKGPSVFPLAPSSKSTSGGTAALGCLVKDYFPEPVTVSWNSGALTSGVHTFPAVLQSSGLYSLSSVVTVPSSSLGTQTYICNVNHKPSNTKVDKKVEPKSCDKTHTCPPCPAPELLGGPSVFLFPPKPKDTLMISRTPEVTCVVVDVSHEDPEVKFNWYVDGVEVHNAKTKPREEQYNSTYRVVSVLTVLHQDWLNGKEYKCKVSNKALPAPIEKTISKAKGQPREPQVYTLPPSRDELTKNQVSLTCLVKGFYPSDIAVEWESNGQPENNYKTTPPVLDSDGSFFLYSKLTVDKSRWQQGNVFSCSVMHEALHNHYTQKSLSLSPG

SEQ ID NO: 1919 - protein, 453 aa, synthetic construct
  REGION 1..453: note = Description of Artificial Sequence: Synthetic polypeptide
  REGION 1..453: note = Synthetic Construct
QVQLVQSGAEVKKPGSSVKVSCKASGYAFSSHWMNWVRQAPGQGLEWMGRIYPGEGDTNYAQKFRGRVTITADESTSTAYMELSSLRSEDTAVYYCARLLRNQPGASYAMDYWGQGTLVTVSSASTKGPSVFPLAPSSKSTSGGTAALGCLVKDYFPEPVTVSWNSGALTSGVHTFPAVLQSSGLYSLSSVVTVPSSSLGTQTYICNVNHKPSNTKVDKKVEPKSCDKTHTCPPCPAPELLGGPSVFLFPPKPKDTLMISRTPEVTCVVVDVSHEDPEVKFNWYVDGVEVHNAKTKPREEQYNSTYRVVSVLTVLHQDWLNGKEYKCKVSNKALPAPIEKTISKAKGQPREPQVYTLPPSRDELTKNQVSLTCLVKGFYPSDIAVEWESNGQPENNYKTTPPVLDSDGSFFLYSKLTVDKSRWQQGNVFSCSVMHEALHNHYTQKSLSLSPGK

SEQ ID NO: 1920 - protein, 452 aa, synthetic construct
  REGION 1..452: note = Description of Artificial Sequence: Synthetic polypeptide
  REGION 1..452: note = Synthetic Construct
QVQLVQSGAEVKKPGSSVKVSCKASGYAFSSHWMNWVRQAPGQGLEWMGRIYPGEGDTNYAQKFRGRVTITADESTSTAYMELSSLRSEDTAVYYCARLLRNQPGASYAMDYWGQGTLVTVSSASTKGPSVFPLAPSSKSTSGGTAALGCLVKDYFPEPVTVSWNSGALTSGVHTFPAVLQSSGLYSLSSVVTVPSSSLGTQTYICNVNHKPSNTKVDKKVEPKSCDKTHTCPPCPAPELLGGPSVFLFPPKPKDTLMISRTPEVTCVVVDVSHEDPEVKFNWYVDGVEVHNAKTKPREEQYNSTYRVVSVLTVLHQDWLNGKEYKCKVSNKALPAPIEKTISKAKGQPREPQVYTLPPSRDELTKNQVSLTCLVKGFYPSDIAVEWESNGQPENNYKTTPPVLDSDGSFFLYSKLTVDKSRWQQGNVFSCSVMHEALHNHYTQKSLSLSPG

SEQ ID NO: 1921 - protein, 219 aa, synthetic construct
  REGION 1..219: note = Description of Artificial Sequence: Synthetic polypeptide
  REGION 1..219: note = Synthetic Construct
DVVMTQSPDSLAVSLGERATINCRSSQSLVHSNRYTYLHWYQQKPGQSPKLLIYKVSNRFSGVPDRFSGSGSGTDFTLKISRVEAEDVGVYYCSQSTRVPYTFGQGTKLEIKRTVAAPSVFIFPPSDEQLKSGTASVVCLLNNFYPREAKVQWKVDNALQSGNSQESVTEQDSKDSTYSLSSTLTLSKADYEKHKVYACEVTHQGLSSPVTKSFNRGEC

SEQ ID NO: 1922 - protein, 219 aa, synthetic construct
  REGION 1..219: note = Description of Artificial Sequence: Synthetic polypeptide
  REGION 1..219: note = Synthetic Construct
DVVMTQTPLSLSVTPGQPASISCRTSQSLVHSNAYTYLHWYLQKPGQSPQLLIYKVSNRVSGVPDRFSGSGSGTDFTLKISRVEAEDVGVYYCSQSTRVPYTFGQGTKLEIKRTVAAPSVFIFPPSDEQLKSGTASVVCLLNNFYPREAKVQWKVDNALQSGNSQESVTEQDSKDSTYSLSSTLTLSKADYEKHKVYACEVTHQGLSSPVTKSFNRGEC

SEQ ID NO: 1923 - protein, 219 aa, synthetic construct
  REGION 1..219: note = Description of Artificial Sequence: Synthetic polypeptide
  REGION 1..219: note = Synthetic Construct
GVVMTQTPLSLSVTPGQPASISCRSSQSLVHSNQYTYLHWYLQKPGQSPQLLIYKVSNRRSGVPDRFSGSGSGTDFTLKISRVEAEDVGVYYCSQSTRVPYTFGQGTKLEIKRTVAAPSVFIFPPSDEQLKSGTASVVCLLNNFYPREAKVQWKVDNALQSGNSQESVTEQDSKDSTYSLSSTLTLSKADYEKHKVYACEVTHQGLSSPVTKSFNRGEC

SEQ ID NO: 1924 - protein, 219 aa, synthetic construct
  REGION 1..219: note = Description of Artificial Sequence: Synthetic polypeptide
  REGION 1..219: note = Synthetic Construct
GVVMTQTPLSLSVTPGQPASISCRSSRSLVHSNQYTYLHWYLQKPGQSPQLLIYKVSNRRSGVPDRFSGSGSGTDFTLKISRVEAEDVGVYYCSQSTRVPYTFGQGTKLEIKRTVAAPSVFIFPPSDEQLKSGTASVVCLLNNFYPREAKVQWKVDNALQSGNSQESVTEQDSKDSTYSLSSTLTLSKADYEKHKVYACEVTHQGLSSPVTKSFNRGEC

SEQ ID NO: 1925 - protein, 219 aa, synthetic construct
  REGION 1..219: note = Description of Artificial Sequence: Synthetic polypeptide
  REGION 1..219: note = Synthetic Construct
GVVMTQTPLSLSVTPGQPASISCRTSRSLVHSNRYTYLHWYLQKPGQSPQLLIYKVSNRRSGVPDRFSGSGSGTDFTLKISRVEAEDVGVYYCSQSTRVPYTFGQGTKLEIKRTVAAPSVFIFPPSDEQLKSGTASVVCLLNNFYPREAKVQWKVDNALQSGNSQESVTEQDSKDSTYSLSSTLTLSKADYEKHKVYACEVTHQGLSSPVTKSFNRGEC

SEQ ID NO: 1926 - protein, 219 aa, Homo sapiens
MEPLRLLILLFVTELSGAHNTTVFQGVAGQSLQVSCPYDSMKHWGRRKAWCRQLGEKGPCQRVVSTHNLWLLSFLRRWNGSTAITDDTLGGTLTITLRNLQPHDAGLYQCQSLHGSEADTLRKVLVEVLADPLDHRDAGDLWFPGESESFEDAHVEHSISRAERHVKEDDGRKSPGEVPPGTSPACILATWPPGLLVLLWQETTLPEHCFSWTLEAGTG

SEQ ID NO: 1927 - protein, 222 aa, Homo sapiens
MEPLRLLILLFVTELSGAHNTTVFQGVAGQSLQVSCPYDSMKHWGRRKAWCRQLGEKGPCQRVVSTHNLWLLSFLRRWNGSTAITDDTLGGTLTITLRNLQPHDAGLYQCQSLHGSEADTLRKVLVEVLADPLDHRDAGDLWFPGESESFEDAHVEHSISRPSQGSHLPSCLSKEPLGRRNPLPTHFHPSPPGLHLSHQDSSSQRPLGCSLAWTEARDTSTQ

SEQ ID NO: 1928 - protein, 227 aa, Mus musculus; identical to SEQ ID NO: 822

SEQ ID NO: 1929 - protein, 249 aa, Mus musculus
MGPLHQFLLLLITALSQALNTTVLQGMAGQSLRVSCTYDALKHWGRRKAWCRQLGEEGPCQRVVSTHGVWLLAFLKKRNGSTVIADDTLAGTVTITLKNLQAGDAGLYQCQSLRGREAEVLQKVLVEVLEDPLDDQDAGDLWVPEESSSFEGAQVEHSTSRQVSSCGSPLAYHLPPLSKESRDLLPTHLHSSPPGLRSPEQVSCSQHPLGCGQGQAEAGNTCGQRAGLWPRCWAPTSDPHWTRRYVREF

SEQ ID NO: 1930 - protein, 228 aa, Rattus norvegicus; identical to SEQ ID NO: 823

SEQ ID NO: 1931 - protein, 10 aa, synthetic construct
  REGION 1..10: note = Description of Artificial Sequence: Synthetic peptide
  REGION 1..10: note = Peptide for immunization for generating an antibody against human TREM2
AHVEHSISRS

SEQ ID NO: 1932 - protein, 7 aa, synthetic construct
  REGION 1..7: note = Description of Artificial Sequence: Synthetic peptide
  REGION 1..7: note = Peptide for immunization for generating an antibod against human TREM2
EDAHVEH

SEQ ID NO: 1933 - protein, 6 aa, synthetic construct
  REGION 1..6: note = Description of Artificial Sequence: Synthetic peptide
  REGION 1..6: note = Peptide for immunization for generating an antibody against human TREM2
SISRSL

SEQ ID NO: 1934 - protein, 10 aa, synthetic construct
  REGION 1..10: note = Description of Artificial Sequence: Synthetic peptide
  REGION 1..10: note = Peptide for immunization for generating an antibody against murine TREM2
AQVEHSTSRN

SEQ ID NO: 1935 - protein, 7 aa, synthetic construct
  REGION 1..7: note = Description of Artificial Sequence: Synthetic peptide
  REGION 1..7: note = Peptide for immunization for generating an antibody against murine TREM2
EGAQVEH

SEQ ID NO: 1936 - protein, 6 aa, synthetic construct
  REGION 1..6: note = Description of Artificial Sequence: Synthetic peptide
  REGION 1..6: note = Peptide for immunization for generating an antibody against murine TREM2
STSRNQ

SEQ ID NO: 1937 - protein, 10 aa, synthetic construct
  REGION 1..10: note = Description of Artificial Sequence: Synthetic peptide
  REGION 1..10: note = Peptide for immunization for generating an antibody against rat TREM2
AQVEHSTSSQ

SEQ ID NO: 1938 - protein, 7 aa, synthetic construct
  REGION 1..7: note = Description of Artificial Sequence: Synthetic peptide
  REGION 1..7: note = Peptide for immunization for generating an antibody against rat TREM2
EGAQVEH

SEQ ID NO: 1939 - protein, 6 aa, synthetic construct
  REGION 1..6: note = Description of Artificial Sequence: Synthetic peptide
  REGION 1..6: note = Peptide for immunization for generating an antibody against rat TREM2
STSSQV

SEQ ID NO: 1940 - protein, 30 aa, synthetic construct
  REGION 1..30: note = Description of Artificial Sequence: Synthetic polypeptide
  REGION 1..30: note = Amino acid stretch within human TREM2, wherein the minimal cleavage site of ADAM10 can be predicted
GESESFEDAHVEHSISRSLLEGEIPFPPTS

SEQ ID NO: 1941 - protein, 171 aa, synthetic construct
  REGION 1..171: note = Description of Artificial Sequence: Synthetic polypeptide
  REGION 1..171: note = Ectodomain of murine TREM2
MGPLHQFLLLLITALSQALNTTVLQGMAGQSLRVSCTYDALKHWGRRKAWCRQLGEEGPCQRVVSTHGVWLLAFLKKRNGSTVIADDTLAGTVTITLKNLQAGDAGLYQCQSLRGREAEVLQKVLVEVLEDPLDDQDAGDLWVPEESSSFEGAQVEHSTSRNQETSFPPTS

SEQ ID NO: 1942 - protein, 35 aa, synthetic construct
  REGION 1..35: note = Description of Artificial Sequence: Synthetic polypeptide
  REGION 1..35: note = Intracellular domain of human TREM2
AAWHGQKPGTHPPSELDCGHDPGYQLQTLPGLRDT

SEQ ID NO: 1943 - protein, 35 aa, synthetic construct
  REGION 1..35: note = Description of Artificial Sequence: Synthetic polypeptide
  REGION 1..35: note = Intracellular domain of murine TREM2
VARGRQKPGTPVVRGLDCGQDAGHQLQILTGPGGT

SEQ ID NO: 1944 - protein, 11 aa, synthetic construct
  REGION 1..11: note = Description of Artificial Sequence: Synthetic peptide
  REGION 1..11: note = Peptide for immunization for generating an antibody against human TREM2
GESESFEDAHV

SEQ ID NO: 1945 - protein, 13 aa, synthetic construct
  REGION 1..13: note = Description of Artificial Sequence: Synthetic peptide
  REGION 1..13: note = Peptide for immunization for generating an antibody against murine TREM2
EHSTSRNQETSFP

SEQ ID NO: 1946 - protein, 122 aa, synthetic construct
  REGION 1..122: note = Description of Artificial Sequence: Synthetic polypeptide
  REGION 1..122: note = Clone 14D3 variable region of the heavy chain
EVKLLEFGGGLVQPGGSMRLSCAASGFTFTDFYMNWIRQPAGRAPEWLGLIRNKTKGYTTEYNRSVKGRFTISRDNTQNMLYLQMNSLRPEDTATYYCARIGVNNGGSLDYWGQGVMVTVSS

SEQ ID NO: 1947 - protein, 122 aa, synthetic construct
  REGION 1..122: note = Description of Artificial Sequence: Synthetic polypeptide
  REGION 1..122: note = Clone 14D8 variable region of the heavy chain
EVKLLESGGGLVQPGGSMRLSCAASGFTFTDFYMNWIRQPAGKAPEWLGLIRNKANGYTTVYNPSVKGRFTISRDNTQNMLYLQMNTLRGEDTATYYCARIGINNGGSLDYWGQGVMVTVSS

SEQ ID NO: 1948 - protein, 122 aa, synthetic construct
  REGION 1..122: note = Description of Artificial Sequence: Synthetic polypeptide
  REGION 1..122: note = Clone 7A12 variable region of the heavy chain
EVKLLESGGGLVQPGGSMRLSCAASGFTFTDFYMNWIRQPAGKAPEWLGLIRNKANGYTTQYNPSVKGRFTISRDNTQNMLYLQMNTLRGEDTATYYCARIGINNGGSLDYWGQGVMVTVSS

SEQ ID NO: 1949 - protein, 122 aa, synthetic construct
  REGION 1..122: note = Description of Artificial Sequence: Synthetic polypeptide
  REGION 1..122: note = Clone 8A11 variable region of the heavy chain
EVKLLESGGGLVQPGGSMRLSCAASGFTFTDFYMNWIRQPAGKAPEWLGLIRNKTKGYTTEYNTSVKGRFTISRDNTQNMLYLQMNSLRPEDTATYYCARIGVNNGGSLDYWGQGVMVTVSS

SEQ ID NO: 1950 - protein, 122 aa, synthetic construct; identical to SEQ ID NO: 1948
  REGION 1..122: note = Description of Artificial Sequence: Synthetic polypeptide
  REGION 1..122: note = Clone 21A3 variable region of the heavy chain

SEQ ID NO: 1951 - protein, 122 aa, synthetic construct
  REGION 1..122: note = Description of Artificial Sequence: Synthetic polypeptide
  REGION 1..122: note = Clone 10C3 variable region of the heavy chain
EVKLLESGGGLVQPGGSMRLSCAASGFTFTDFYMNWIRQPAGETPEWLGLIRNKTKGYTTEYNPSVKGRFTISRDNTQNMLYLQMNSLRPEDTATYYCARIGTNNGGSLDYWGQGVMVTVSS

SEQ ID NO: 1952 - protein, 122 aa, synthetic construct
  REGION 1..122: note = Description of Artificial Sequence: Synthetic polypeptide
  REGION 1..122: note = Clone 18F9 variable region of the heavy chain
EVKLLESGGGLVQPGGSMRLSCVVSGFTFTDFYMNWIRQAAGKAPEWLGLIRNKVNGYRTEYNPSVKGRFTISRDNIQNMLYLQMNTLRAEDTATYYCARIGINNGGSLDYWGQGVMVTVSS

SEQ ID NO: 1953 - protein, 122 aa, synthetic construct
  REGION 1..122: note = Description of Artificial Sequence: Synthetic polypeptide
  REGION 1..122: note = Clone 15C5 variable region of the heavy chain
EVKLLESGGGLVQPGGSMRLSCAASGFTFTDFYMNWIRQPAGKAPEWLGLIRNKAYGYTTEYNPSVKGRFTISRDNTQDMLYLQMNTLRAEDTATYYCARIGINYGGSLDYWGQGVMVTVSS

SEQ ID NO: 1954 - protein, 122 aa, synthetic construct
  REGION 1..122: note = Description of Artificial Sequence: Synthetic polypeptide
  REGION 1..122: note = Clone 1G6 variable region of the heavy chain
EVKLLESGGGLVQPGGSLRLSCVASGFTFTDFYMNWIRQPAGKAPEWLGLIRNKANGFTTEYNPSVKGRFTISRDNTQHMLYLQMNTLRAEDTATYYCARIGINNGGSLDYWGQGVMVTVSS

SEQ ID NO: 1955 - protein, 121 aa, synthetic construct
  REGION 1..121: note = Description of Artificial Sequence: Synthetic polypeptide
  REGION 1..121: note = Consensus sequence
EVKLLESGGGLVQPGGSMRLSCAASGFTFTDFYMNWIRQPAGKAPEWLGLIRNKANGYTTEYNPSVKGRFTISRDNTQNMLYLQMNTLREDTATYYCARIGINNGGSLDYWGQGVMVTVSS

SEQ ID NO: 1956 - protein, 113 aa, synthetic construct
  REGION 1..113: note = Description of Artificial Sequence: Synthetic polypeptide
  REGION 1..113: note = Clone 14D3 variable region of the light chain
DILIIQSPASLTVSAGARVTMSCKSSQSLLYSENNQDYLAWYQQKPGQFPKLLIYGASNRHTGVPDRFTGSGSGTDFTLTISSVQAEDLADYYCEQTYSYPYTFGAGTKLELK

SEQ ID NO: 1957 - protein, 113 aa, synthetic construct
  REGION 1..113: note = Description of Artificial Sequence: Synthetic polypeptide
  REGION 1..113: note = Clone 14D8 variable region of the light chain
DILINQSPASLTVSTGEKVTMSCRSSQSLLYSEKNQDYLAWYQQKPGQFPKLLIYGASYRHTGVPDRFTGSGSGTDFTLTISSVQAEDLADYYCEQTYSYPYTFGAGTKLELK

SEQ ID NO: 1958 - protein, 113 aa, synthetic construct
  REGION 1..113: note = Description of Artificial Sequence: Synthetic polypeptide
  REGION 1..113: note = Clone 7A12 variable region of the light chain
DILINQSPASLTVSAGEKVTMSCKSSQSLLYSEKNQDYLAWYQQKPGQSPKLLMYGASYRHTGVPDRFTGSGSGTDFTLTISSVQAEDLADYYCEQTYSYPYTFGAGTKLELK

SEQ ID NO: 1959 - protein, 113 aa, synthetic construct; identical to SEQ ID NO: 1956
  REGION 1..113: note = Description of Artificial Sequence: Synthetic polypeptide
  REGION 1..113: note = Clone 8A11 variable region of the light chain

SEQ ID NO: 1960 - protein, 113 aa, synthetic construct; identical to SEQ ID NO: 1958
  REGION 1..113: note = Description of Artificial Sequence: Synthetic polypeptide
  REGION 1..113: note = Clone 21A3 variable region of the light chain

SEQ ID NO: 1961 - protein, 113 aa, synthetic construct; identical to SEQ ID NO: 1956
  REGION 1..113: note = Description of Artificial Sequence: Synthetic polypeptide
  REGION 1..113: note = Clone 10C3 variable region of the light chain

SEQ ID NO: 1962 - protein, 113 aa, synthetic construct
  REGION 1..113: note = Description of Artificial Sequence: Synthetic polypeptide
  REGION 1..113: note = Clone 18F9 variable chain of the light region
DILINQSPASLTVSAGEKVTMSCKSSQSLLYSENNQDYLAWYQQKPGQFPKLLIYGASNRHTGVPDRFTGSGSGTDFTLTISSVQAEDLADYYCEQTYSYPYTFGAGTKLELK

SEQ ID NO: 1963 - protein, 113 aa, synthetic construct
  REGION 1..113: note = Description of Artificial Sequence: Synthetic polypeptide
  REGION 1..113: note = Clone 15C5 variable region of the light chain
DILINQSPASLTVSAGEKVTVSCKSSQSLLYSESNQDYLAWYQQKPGQFPKLLIYGASYRHTGVPDRFTGSGSGTDFTLTISSVQAEDLAHYYCEQTYSYPYTFGAGTKLELK

SEQ ID NO: 1964 - protein, 113 aa, synthetic construct
  REGION 1..113: note = Description of Artificial Sequence: Synthetic polypeptide
  REGION 1..113: note = Clone 1G6 variable region of the light chain
DILINQSPASLTVSTGEKVTMSCKSSQSLLYSENKQDYLAWYQQKPGQFPKLLIYGASNRHTGVPDRFTGSGSGTDFTLTINIVQAEDLADYYCEQTYSYPYTFGAGTKLELK

SEQ ID NO: 1965 - protein, 113 aa, synthetic construct; identical to SEQ ID NO: 1962
  REGION 1..113: note = Description of Artificial Sequence: Synthetic polypeptide
  REGION 1..113: note = Consensus sequence

SEQ ID NO: 1966 - protein, 8 aa, synthetic construct
  REGION 1..8: note = Description of Artificial Sequence: Synthetic peptide
  REGION 1..8: note = Clone 14D3 CDR1 of the heavy chain
GFTFTDFY

SEQ ID NO: 1967 - protein, 8 aa, synthetic construct
  REGION 1..8: note = Description of Artificial Sequence: Synthetic peptide
  REGION 1..8: note = Clone 14D8 CDR1 of the heavy chain
GFTFTDFY

SEQ ID NO: 1968 - protein, 8 aa, synthetic construct
  REGION 1..8: note = Description of Artificial Sequence: Synthetic peptide
  REGION 1..8: note = Clone 7A12 CDR1 of the heavy chain
GFTFTDFY

SEQ ID NO: 1969 - protein, 8 aa, synthetic construct
  REGION 1..8: note = Description of Artificial Sequence: Synthetic peptide
  REGION 1..8: note = Clone 8A11 CDR1 of the heavy chain
GFTFTDFY

SEQ ID NO: 1970 - protein, 8 aa, synthetic construct
  REGION 1..8: note = Description of Artificial Sequence: Synthetic peptide
  REGION 1..8: note = Clone 21A3 CDR1 of the heavy chain
GFTFTDFY

SEQ ID NO: 1971 - protein, 8 aa, synthetic construct
  REGION 1..8: note = Description of Artificial Sequence: Synthetic peptide
  REGION 1..8: note = Clone 10C3 CDR1 of the heavy chain
GFTFTDFY

SEQ ID NO: 1972 - protein, 8 aa, synthetic construct
  REGION 1..8: note = Description of Artificial Sequence: Synthetic peptide
  REGION 1..8: note = Clone 18F9 CDR1 of the heavy chain
GFTFTDFY

SEQ ID NO: 1973 - protein, 8 aa, synthetic construct
  REGION 1..8: note = Description of Artificial Sequence: Synthetic peptide
  REGION 1..8: note = Clone 15C5 CDR1
GFTFTDFY

SEQ ID NO: 1974 - protein, 8 aa, synthetic construct
  REGION 1..8: note = Description of Artificial Sequence: Synthetic peptide
  REGION 1..8: note = Clone 1G6 CDR1 of the heavy chain
GFTFTDFY

SEQ ID NO: 1975 - protein, 8 aa, synthetic construct
  REGION 1..8: note = Description of Artificial Sequence: Synthetic peptide
  REGION 1..8: note = Consensus Sequence CDR1 of the heavy chain
GFTFTDFY

SEQ ID NO: 1976 - protein, 10 aa, synthetic construct
  REGION 1..10: note = Description of Artificial Sequence: Synthetic peptide
  REGION 1..10: note = Clone 14D3 CDR2 of the heavy chain
IRNKTKGYTT

SEQ ID NO: 1977 - protein, 10 aa, synthetic construct
  REGION 1..10: note = Description of Artificial Sequence: Synthetic peptide
  REGION 1..10: note = Clone 14D8 CDR2 of the heavy chain
IRNKANGYTT

SEQ ID NO: 1978 - protein, 10 aa, synthetic construct
  REGION 1..10: note = Description of Artificial Sequence: Synthetic peptide
  REGION 1..10: note = Clone 7A12 CDR2
IRNKANGYTT

SEQ ID NO: 1979 - protein, 10 aa, synthetic construct
  REGION 1..10: note = Description of Artificial Sequence: Synthetic peptide
  REGION 1..10: note = Clone 8A11 CDR2 of the heavy chain
IRNKTKGYTT

SEQ ID NO: 1980 - protein, 10 aa, synthetic construct
  REGION 1..10: note = Description of Artificial Sequence: Synthetic peptide
  REGION 1..10: note = Clone 21A3 CDR2 of the heavy chain
IRNKANGYTT

SEQ ID NO: 1981 - protein, 10 aa, synthetic construct
  REGION 1..10: note = Description of Artificial Sequence: Synthetic peptide
  REGION 1..10: note = Clone 10C3 CDR2 of the heavy chain
IRNKTKGYTT

SEQ ID NO: 1982 - protein, 10 aa, synthetic construct
  REGION 1..10: note = Description of Artificial Sequence: Synthetic peptide
  REGION 1..10: note = Clone 18F9 CDR2 of the heavy chain
IRNKVNGYRT

SEQ ID NO: 1983 - protein, 10 aa, synthetic construct
  REGION 1..10: note = Description of Artificial Sequence: Synthetic peptide
  REGION 1..10: note = Clone 15C5 CDR2 of the heavy chain
IRNKAYGYTT

SEQ ID NO: 1984 - protein, 10 aa, synthetic construct
  REGION 1..10: note = Description of Artificial Sequence: Synthetic peptide
  REGION 1..10: note = Clone 1G6 CDR2 of the heavy chain
IRNKANGFTT

SEQ ID NO: 1985 - protein, 10 aa, synthetic construct
  REGION 1..10: note = Description of Artificial Sequence: Synthetic peptide
  REGION 1..10: note = Consensus Sequence CDR2 of the heavy chain
IRNKANGYTT

SEQ ID NO: 1986 - protein, 15 aa, synthetic construct
  REGION 1..15: note = Description of Artificial Sequence: Synthetic peptide
  REGION 1..15: note = Clone 14D3 CDR3 of the heavy chain
ARIGVNNGGSLDYWG

SEQ ID NO: 1987 - protein, 15 aa, synthetic construct
  REGION 1..15: note = Description of Artificial Sequence: Synthetic peptide
  REGION 1..15: note = Clone 14D8 CDR3 of the heavy chain
ARIGINNGGSLDYWG

SEQ ID NO: 1988 - protein, 15 aa, synthetic construct
  REGION 1..15: note = Description of Artificial Sequence: Synthetic peptide
  REGION 1..15: note = Clone 7A12 CDR3 of the heavy chain
ARIGINNGGSLDYWG

SEQ ID NO: 1989 - protein, 15 aa, synthetic construct
  REGION 1..15: note = Description of Artificial Sequence: Synthetic peptide
  REGION 1..15: note = Clone 8A11 CDR3 of the heavy chain
ARIGVNNGGSLDYWG

SEQ ID NO: 1990 - protein, 15 aa, synthetic construct
  REGION 1..15: note = Description of Artificial Sequence: Synthetic peptide
  REGION 1..15: note = Clone 21A3 CDR3 of the heavy chain
ARIGINNGGSLDYWG

SEQ ID NO: 1991 - protein, 15 aa, synthetic construct
  REGION 1..15: note = Description of Artificial Sequence: Synthetic peptide
  REGION 1..15: note = Clone 10C3 CDR3 of the heavy chain
ARIGTNNGGSLDYWG

SEQ ID NO: 1992 - protein, 15 aa, synthetic construct
  REGION 1..15: note = Description of Artificial Sequence: Synthetic peptide
  REGION 1..15: note = Clone 18F9 CDR3 of the heavy chain
ARIGINNGGSLDYWG

SEQ ID NO: 1993 - protein, 15 aa, synthetic construct
  REGION 1..15: note = Description of Artificial Sequence: Synthetic peptide
  REGION 1..15: note = Clone 15C5 CDR3 of the heavy chain
ARIGINYGGSLDYWG

SEQ ID NO: 1994 - protein, 15 aa, synthetic construct
  REGION 1..15: note = Description of Artificial Sequence: Synthetic peptide
  REGION 1..15: note = Clone 1G6 CDR3 of the heavy chain
ARIGINNGGSLDYWG

SEQ ID NO: 1995 - protein, 15 aa, synthetic construct
  REGION 1..15: note = Description of Artificial Sequence: Synthetic peptide
  REGION 1..15: note = Consensus Sequence CDR3 of the heavy chain
ARIGINNGGSLDYWG

SEQ ID NO: 1996 - protein, 12 aa, synthetic construct
  REGION 1..12: note = Description of Artificial Sequence: Synthetic peptide
  REGION 1..12: note = Clone 14D3 CDR1 of the light chain
QSLLYSENNQDY

SEQ ID NO: 1997 - protein, 12 aa, synthetic construct
  REGION 1..12: note = Description of Artificial Sequence: Synthetic peptide
  REGION 1..12: note = Clone 14D8 CDR1 of the light chain
QSLLYSEKNQDY

SEQ ID NO: 1998 - protein, 12 aa, synthetic construct
  REGION 1..12: note = Description of Artificial Sequence: Synthetic peptide
  REGION 1..12: note = Clone 7A12 CDR1 of the light chain
QSLLYSEKNQDY

SEQ ID NO: 1999 - protein, 12 aa, synthetic construct
  REGION 1..12: note = Description of Artificial Sequence: Synthetic peptide
  REGION 1..12: note = Clone 8A11 CDR1 of the light chain
QSLLYSENNQDY

SEQ ID NO: 2000 - protein, 12 aa, synthetic construct
  REGION 1..12: note = Description of Artificial Sequence: Synthetic peptide
  REGION 1..12: note = Clone 21A3 CDR1 of the light chain
QSLLYSEKNQDY

SEQ ID NO: 2001 - protein, 12 aa, synthetic construct
  REGION 1..12: note = Description of Artificial Sequence: Synthetic peptide
  REGION 1..12: note = Clone 10C3 CDR1 of the light chain
QSLLYSENNQDY

SEQ ID NO: 2002 - protein, 12 aa, synthetic construct
  REGION 1..12: note = Description of Artificial Sequence: Synthetic peptide
  REGION 1..12: note = Clone 18F9 CDR1 of the light chain
QSLLYSENNQDY

SEQ ID NO: 2003 - protein, 12 aa, synthetic construct
  REGION 1..12: note = Description of Artificial Sequence: Synthetic peptide
  REGION 1..12: note = Clone 15C5 CDR1 of the light chain
QSLLYSESNQDY

SEQ ID NO: 2004 - protein, 12 aa, synthetic construct
  REGION 1..12: note = Description of Artificial Sequence: Synthetic peptide
  REGION 1..12: note = Clone 1G6 CDR1 of the light chain
QSLLYSENKQDY

SEQ ID NO: 2005 - protein, 12 aa, synthetic construct
  REGION 1..12: note = Description of Artificial Sequence: Synthetic peptide
  REGION 1..12: note = Consensus Sequence CDR1 of the light chain
QSLLYSENNQDY

SEQ ID NO: 2006-2015 - skipped (10 entries)

SEQ ID NO: 2016 - protein, 9 aa, synthetic construct
  REGION 1..9: note = Description of Artificial Sequence: Synthetic peptide
  REGION 1..9: note = Clone 14D3 CDR3 of the light chain
EQTYSYPYT

SEQ ID NO: 2017 - protein, 9 aa, synthetic construct
  REGION 1..9: note = Description of Artificial Sequence: Synthetic peptide
  REGION 1..9: note = Clone 14D8 CDR3 of the light chain
EQTYSYPYT

SEQ ID NO: 2018 - protein, 9 aa, synthetic construct
  REGION 1..9: note = Description of Artificial Sequence: Synthetic peptide
  REGION 1..9: note = Clone 7A12 CDR3 of the light chain
EQTYSYPYT

SEQ ID NO: 2019 - protein, 9 aa, synthetic construct
  REGION 1..9: note = Description of Artificial Sequence: Synthetic peptide
  REGION 1..9: note = Clone 8A11 CDR3 of the light chain
EQTYSYPYT

SEQ ID NO: 2020 - protein, 9 aa, synthetic construct
  REGION 1..9: note = Description of Artificial Sequence: Synthetic peptide
  REGION 1..9: note = Clone 21A3 CDR3 of the light chain
EQTYSYPYT

SEQ ID NO: 2021 - protein, 9 aa, synthetic construct
  REGION 1..9: note = Description of Artificial Sequence: Synthetic peptide
  REGION 1..9: note = Clone 10C3 CDR3 of the light chain
EQTYSYPYT

SEQ ID NO: 2022 - protein, 9 aa, synthetic construct
  REGION 1..9: note = Description of Artificial Sequence: Synthetic peptide
  REGION 1..9: note = Clone 18F9 CDR3 of the light chain
EQTYSYPYT

SEQ ID NO: 2023 - protein, 9 aa, synthetic construct
  REGION 1..9: note = Description of Artificial Sequence: Synthetic peptide
  REGION 1..9: note = Clone 15C5 CDR3 of the light chain
EQTYSYPYT

SEQ ID NO: 2024 - protein, 9 aa, synthetic construct
  REGION 1..9: note = Description of Artificial Sequence: Synthetic peptide
  REGION 1..9: note = Clone 1G6 CDR3 of the light chain
EQTYSYPYT

SEQ ID NO: 2025 - protein, 9 aa, synthetic construct
  REGION 1..9: note = Description of Artificial Sequence: Synthetic peptide
  REGION 1..9: note = Consensus Sequence CDR3 of the light chain
EQTYSYPYT

SEQ ID NO: 2026 - protein, 13 aa, synthetic construct
  REGION 1..13: note = Description of Artificial Sequence: Synthetic peptide
  REGION 1..13: note = First part of TREM2 WT CTF Flag
SISRSLLEGEIPF

SEQ ID NO: 2027 - protein, 8 aa, synthetic construct
  REGION 1..8: note = Description of Artificial Sequence: Synthetic peptide
  REGION 1..8: note = Last part of TREM2 WT CTF Flag
DYKDDDDK

SEQ ID NO: 2028 - protein, 9 aa, synthetic construct
  REGION 1..9: note = Description of Artificial Sequence: Synthetic peptide
  REGION 1..9: note = First part of Flag-TREM2(133-157)
GDYKDDDDK

SEQ ID NO: 2029 - protein, 9 aa, synthetic construct
  REGION 1..9: note = Description of Artificial Sequence: Synthetic peptide
  REGION 1..9: note = Last part of Flag-TREM2(133-157)
SFEDAHVEH

SEQ ID NO: 2030 - protein, 13 aa, synthetic construct
  REGION 1..13: note = Description of Artificial Sequence: Synthetic peptide
  REGION 1..13: note = First part of TREM2 WT CTF
SISRSLLEGEIPF

SEQ ID NO: 2031 - protein, 9 aa, synthetic construct
  REGION 1..9: note = Description of Artificial Sequence: Synthetic peptide
  REGION 1..9: note = Last part of TREM2 WT CTF
QTLPGLRDT

SEQ ID NO: 2032 - protein, 13 aa, synthetic construct
  REGION 1..13: note = Description of Artificial Sequence: Synthetic peptide
  REGION 1..13: note = First part of TREM2 WT CTF Flag L163
LEGEIPFPPTSIL

SEQ ID NO: 2033 - protein, 8 aa, synthetic construct
  REGION 1..8: note = Description of Artificial Sequence: Synthetic peptide
  REGION 1..8: note = Last part of TREM2 WT CTF Flag L163
DYKDDDDK

SEQ ID NO: 2034 - protein, 13 aa, synthetic construct
  REGION 1..13: note = Description of Artificial Sequence: Synthetic peptide
  REGION 1..13: note = First part of TREM2 WT CTF Flag L164
EGEIPFPPTSILL

SEQ ID NO: 2035 - protein, 8 aa, synthetic construct
  REGION 1..8: note = Description of Artificial Sequence: Synthetic peptide
  REGION 1..8: note = Last part of TREM2 WT CTF Flag L164
DYKDDDDK

SEQ ID NO: 2036 - protein, 13 aa, synthetic construct
  REGION 1..13: note = Description of Artificial Sequence: Synthetic peptide
  REGION 1..13: note = First part of TREM2 WT CTF Flag - E165
GEIPFPPTSILLL

SEQ ID NO: 2037 - protein, 8 aa, synthetic construct
  REGION 1..8: note = Description of Artificial Sequence: Synthetic peptide
  REGION 1..8: note = Last part of TREM2 WT CTF Flag E165
DYKDDDDK

SEQ ID NO: 2038 - protein, 30 aa, synthetic construct
  REGION 1..30: note = Description of Artificial Sequence: Synthetic polypeptide
  REGION 1..30: note = Peptide used for immunization to generate cleavage-site-specific antibodies
EDAHVEHSISRSLLEGEIPFPPTSILLLLA

SEQ ID NO: 2039 - protein, 9 aa, synthetic construct
  REGION 1..9: note = Description of Artificial Sequence: Synthetic peptide
  REGION 1..9: note = HA-tag
YPYDVPDYA

SEQ ID NO: 2040 - protein, 8 aa, synthetic construct
  REGION 1..8: note = Description of Artificial Sequence: Synthetic peptide
  REGION 1..8: note = linker sequence
SGGGGGLE

SEQ ID NO: 2041 - protein, 8 aa, synthetic construct
  REGION 1..8: note = Description of Artificial Sequence: Synthetic peptide
  REGION 1..8: note = C-terminal FLAG tag
DYKDDDDK

SEQ ID NO: 2042 - DNA, 20 bp, synthetic construct
  misc_feature 1..20: note = Description of Artificial Sequence: Synthetic oligonucleotide
  misc_feature 1..20: note = Synthetic Construct
  source 1..20: mol_type = other DNA
ggacagggatccagagttcc

SEQ ID NO: 2043 - DNA, 20 bp, synthetic construct
  misc_feature 1..20: note = Description of Artificial Sequence: Synthetic oligonucleotide
  misc_feature 1..20: note = Synthetic Construct
  source 1..20: mol_type = other DNA
agctgggaaggtgtgcacac

SEQ ID NO: 2044 - DNA, 19 bp, synthetic construct
  misc_feature 1..19: note = Description of Artificial Sequence: Synthetic oligonucleotide
  misc_feature 1..19: note = Synthetic Construct
  source 1..19: mol_type = other DNA
caggggccagtggatagac

SEQ ID NO: 2045 - DNA, 20 bp, synthetic construct
  misc_feature 1..20: note = Description of Artificial Sequence: Synthetic oligonucleotide
  misc_feature 1..20: note = Synthetic Construct
  source 1..20: mol_type = other DNA
gacattgatgtctttggggt

SEQ ID NO: 2046 - DNA, 20 bp, synthetic construct
  misc_feature 1..20: note = Description of Artificial Sequence: Synthetic oligonucleotide
  misc_feature 1..20: note = Synthetic Construct
  source 1..20: mol_type = other DNA
ttcactgccatcaatcttcc

SEQ ID NO: 2047 - protein, 140 aa, synthetic construct
  REGION 1..140: note = Description of Artificial Sequence: Synthetic polypeptide
  REGION 1..140: note = Synthetic Construct
QVQLQQPGAELVKPGASVKLSCKASGYTFTSYWMHWVKQSPGRGLEWIGRSDPTTGGTNYNEKFKTKATLTVDKPSSTAYMQLSSLTSDDSAVYYCVRTSGTGDYWGQGTSLTVSSAKTTAPSVYPLAPVCGGTTGSSVT

SEQ ID NO: 2048 - protein, 140 aa, synthetic construct
  REGION 1..140: note = Description of Artificial Sequence: Synthetic polypeptide
  REGION 1..140: note = Synthetic Construct
DVVMTQTPLSLPVSLGDQASISCRSSQSLVHNNGNTFLHWYLQKPGQSPKLLIYKVSNRFSGVPDRFSGSGSGTDFTLKISRVEAEDLGVYFCSQTTHVPPTFGGGTKLEIKRADAAPTVSIFPPSSEQLTSGGASVVCF

SEQ ID NO: 2049 - protein, 7 aa, synthetic construct
  REGION 1..7: note = Description of Artificial Sequence: Synthetic peptide
  REGION 1..7: note = Synthetic Construct
GYTFTSY

SEQ ID NO: 2050 - protein, 15 aa, synthetic construct
  REGION 1..15: note = Description of Artificial Sequence: Synthetic peptide
  REGION 1..15: note = Synthetic Construct
IGRSDPTTGGTNYNE

SEQ ID NO: 2051 - protein, 9 aa, synthetic construct
  REGION 1..9: note = Description of Artificial Sequence: Synthetic peptide
  REGION 1..9: note = Synthetic Construct
VRTSGTGDY

SEQ ID NO: 2052 - protein, 16 aa, synthetic construct
  REGION 1..16: note = Description of Artificial Sequence: Synthetic peptide
  REGION 1..16: note = Synthetic Construct
RSSQSLVHNNGNTFLH

SEQ ID NO: 2053 - protein, 6 aa, synthetic construct
  REGION 1..6: note = Description of Artificial Sequence: Synthetic peptide
  REGION 1..6: note = Synthetic Construct
VSNRFS

SEQ ID NO: 2054 - protein, 9 aa, synthetic construct
  REGION 1..9: note = Description of Artificial Sequence: Synthetic peptide
  REGION 1..9: note = Synthetic Construct
SQTTHVPPT

SEQ ID NO: 2055 - protein, 122 aa, synthetic construct
  REGION 1..122: note = Description of Artificial Sequence: Synthetic polypeptide
  REGION 1..122: note = Synthetic Construct
QVQLQQSGAELARPGASVKLSCKASGYTFTSYWIQWVKQRPGQGLEWIGTIYPGDGDARYTQKFKGKATLTADKSSSTTYMQLNSLASEDSAVYYCARNGITTAGYYAMDYWGQGTSVTVSS

SEQ ID NO: 2056 - protein, 119 aa, synthetic construct
  REGION 1..119: note = Description of Artificial Sequence: Synthetic polypeptide
  REGION 1..119: note = Synthetic Construct
QVQLQQSGADLLRPGVSVKISCKGSGYTFTDHAMHWVKQSHAESLEWIGVISTYSGDTGYNQKFKGKATMTVDKSSSTAYLELARLTSEDSAIYYCAREGHYDDAMDYWGQGTSVTVSS

SEQ ID NO: 2057 - protein, 119 aa, synthetic construct
  REGION 1..119: note = Description of Artificial Sequence: Synthetic polypeptide
  REGION 1..119: note = Synthetic Construct
EVQLQQSGPELVKPGASVKMSCKASGYTFTSYVMHWVKQKPGQGLEWIGYINPYTDGTKYNEKFKGKATLTSDKSSSTAYMDLSSLTSEDSAVYYCARGEVRRYALDYWGQGTSVTVSS

SEQ ID NO: 2058 - protein, 118 aa, synthetic construct
  REGION 1..118: note = Description of Artificial Sequence: Synthetic polypeptide
  REGION 1..118: note = Synthetic Construct
QVHLQQSGSELRSPGSSVKLSCKDFDSEVFPISYMSWIRQKPGHGFEWIGDILPSIGGRIYGVKFEDRATLDADTVSNTAYLELNSLTSEDSAIYYCARKDYGSLAYWGQGTLVTVSA

SEQ ID NO: 2059 - protein, 122 aa, synthetic construct
  REGION 1..122: note = Description of Artificial Sequence: Synthetic polypeptide
  REGION 1..122: note = Synthetic Construct
EVQLQQSGPELVKPGASVKISCKTSGYTLSEYTMHWVIQSHGKSLEWIGGVIPNSGGTSYNQKFRDKASLTVDKSSSTAYLELRSLTSEDSAVYYCARGDDSYRRGYALDYWGQGTSVTVSS

SEQ ID NO: 2060 - protein, 113 aa, synthetic construct
  REGION 1..113: note = Description of Artificial Sequence: Synthetic polypeptide
  REGION 1..113: note = Synthetic Construct
EVQLQQSGAEVVKPGASVKLSCTASGFNIKDTYMHWVKQRPEQGLEWIGRIDPANGNTKYDPKFQGKATITADTSSNTAYLQLSSLTSEDTAVYYCATLFAYWGQGTLVTVSA

SEQ ID NO: 2061 - protein, 118 aa, synthetic construct
  REGION 1..118: note = Description of Artificial Sequence: Synthetic polypeptide
  REGION 1..118: note = Synthetic Construct
DVQLQESGPGLVKPSQSLSLTCTVTGYSITSDYAWNWIRQFPGNKLEWMGYINYSGRTIYNPSLKSRISITRDTSKNHFFLQLISVTTEDTATYYCARWNGNYGFAYWGQGTLVTVSA

SEQ ID NO: 2062 - protein, 118 aa, synthetic construct
  REGION 1..118: note = Description of Artificial Sequence: Synthetic polypeptide
  REGION 1..118: note = Synthetic Construct
DVQLQESGPGLVKPSQSLSLTCTVTGYSITSDYAWNWIRQFPGNRLEWMGYISFSGSTSYNPSLKSRISITRDTSKNQFFLQLNSVTTEDTATYYCARWNGNYGFAYWGQGTLVTVSA

SEQ ID NO: 2063 - protein, 118 aa, synthetic construct
  REGION 1..118: note = Description of Artificial Sequence: Synthetic polypeptide
  REGION 1..118: note = Synthetic Construct
QVHLQQSGSELRSPGSSVKLSCKDFDSEVFPIAYMSWVRQKPGHGFEWIGDILPSIGRRIYGVKFEDKATLDADTVSNTAYLELNSLTSEDSAIYYCTRKDYGSLAYWGQGTLVTVSA

SEQ ID NO: 2064 - protein, 114 aa, synthetic construct
  REGION 1..114: note = Description of Artificial Sequence: Synthetic polypeptide
  REGION 1..114: note = Synthetic Construct
QVQLKESGPGLVAPSQSLSITCTVSGFSLSRYSVYWVRQPPGKGLEWLGMIWGGGNTDYNSALKSRLSISKDNSKSQVFLKMNSLQTDDSAMYYCVQYGGMDYWGQGTSVTVSS

SEQ ID NO: 2065 - protein, 116 aa, synthetic construct
  REGION 1..116: note = Description of Artificial Sequence: Synthetic polypeptide
  REGION 1..116: note = Synthetic Construct
QVQLQQPGAELVKPGASVKLSCKASGYTFTSYWMHWVKQSPGRGLEWIGRSDPTTGGTNYNEKFKTKATLTVDKPSSTAYMQLSSLTSDDSAVYYCVRTSGTGDYWGQGTSLTVSS

SEQ ID NO: 2066 - protein, 107 aa, synthetic construct
  REGION 1..107: note = Description of Artificial Sequence: Synthetic polypeptide
  REGION 1..107: note = Synthetic Construct
DIQMTQSPASLSVSVGETVTITCRASENIYSNLAWYQQKQGRSPQLLVYAATNLADGVPSRFSGSGSGTQYSLKINSLQSEDFGYYYCQHFWGTPYTFGGGTKVEIK

SEQ ID NO: 2067 - protein, 112 aa, synthetic construct
  REGION 1..112: note = Description of Artificial Sequence: Synthetic polypeptide
  REGION 1..112: note = Synthetic Construct
DVVMTQTPLTLSVTIGQPASFSCKSSQSLLDSDGKTYLNWLLRRPGQSPKRLIYVVSKLDSGVPDRFTGSGSGTDFTLKISRVEAEDLGVYYCWQGTHFPYTFGGGTKLEIK

SEQ ID NO: 2068 - protein, 107 aa, synthetic construct
  REGION 1..107: note = Description of Artificial Sequence: Synthetic polypeptide
  REGION 1..107: note = Synthetic Construct
DIQMTQSSSSFSVSLGDRVTITCKASEDIYNRLAWYQQKPGNAPRLLISGATSLETGVPSRFSGSGSGKDYTLSITSLQTEDVATYYCQQYWSTPWTFGGGTKLEIK

SEQ ID NO: 2069 - protein, 112 aa, synthetic construct
  REGION 1..112: note = Description of Artificial Sequence: Synthetic polypeptide
  REGION 1..112: note = Synthetic Construct
DVVMTQTPLSLPVSLGDQASISCRSSQSLVHINGNTYLQWFLQKPGQSPKLLIYKVSNRFSGVPDRFSGSGSGTAFTLKISRVEAEDLGVYFCSQSTHVPYTFGGGTKLEIK

SEQ ID NO: 2070 - protein, 113 aa, synthetic construct
  REGION 1..113: note = Description of Artificial Sequence: Synthetic polypeptide
  REGION 1..113: note = Synthetic Construct
DIVMSQSPSSLAVSVGEKVTMSCKSSQSLLYSSNQKSYLAWYQQKPGQSPKLLIYWASTRESGVPDRFRGSGSGTDFTLTISSVKAEDLAVYYCQQYFSYPPTFGGGTKLEIK

SEQ ID NO: 2071 - protein, 111 aa, synthetic construct
  REGION 1..111: note = Description of Artificial Sequence: Synthetic polypeptide
  REGION 1..111: note = Synthetic Construct
DIVMTQAAFSNPVTLGTSASISCRSSKSLLHSNGITYLYWYLQKPGQSPQLLIYQMSNLASGVPDRFSSSGSGIDFTLRINRVEAEDVGVYYCAQNLELPTFGSGTKLEIK

SEQ ID NO: 2072 - protein, 112 aa, synthetic construct
  REGION 1..112: note = Description of Artificial Sequence: Synthetic polypeptide
  REGION 1..112: note = Synthetic Construct
DVVMTQNPLSLPVSLGDQASISCRSSQSLVHINGNTYLHWYLQKPGQSPKLLIYKVSNRFSGVPDRFSGSGSGTDFTLKISRVEAEDLGVYFCSQTTHALFTFGSGTKLEIK

SEQ ID NO: 2073 - protein, 112 aa, synthetic construct
  REGION 1..112: note = Description of Artificial Sequence: Synthetic polypeptide
  REGION 1..112: note = Synthetic Construct
DVVMTQTPLSLPVSLGDQASISCRSSQSLVHINGNTYLHWYLQKPGQSPKLLIYKVSNRFSGVPDRFSGSGSGTDFTLKISRVEAEDLGVYFCSQSTHVTFTFGSGTKLEIK

SEQ ID NO: 2074 - protein, 112 aa, synthetic construct
  REGION 1..112: note = Description of Artificial Sequence: Synthetic polypeptide
  REGION 1..112: note = Synthetic Construct
DVVMTQTPLSLPVSLGDQASISCRSSQSLVHINGNTYLQWYLQKPGQSPKLLIYKVSNRFSGVPDRFSGSGSGTDFTLRISRVEAEDLGVYFCSQSTHLPYTFGGGTKLEIK

SEQ ID NO: 2075 - protein, 112 aa, synthetic construct
  REGION 1..112: note = Description of Artificial Sequence: Synthetic polypeptide
  REGION 1..112: note = Synthetic Construct
DVLMTQTPLSLPVSLGDQASISCRSSQSIVHSNGNTYLEWYLQKPGQSPKLLIYKVSNRFSGVPDRFSGSGSGTDFTLKISRVEAEDLGVYYCFQGSHVPYTFGGGTKLEIK

SEQ ID NO: 2076 - protein, 112 aa, synthetic construct
  REGION 1..112: note = Description of Artificial Sequence: Synthetic polypeptide
  REGION 1..112: note = Synthetic Construct
DVVMTQTPLSLPVSLGDQASISCRSSQSLVHNNGNTFLHWYLQKPGQSPKLLIYKVSNRFSGVPDRFSGSGSGTDFTLKISRVEAEDLGVYFCSQTTHVPPTFGGGTKLEIK

SEQ ID NO: 2077 - protein, 10 aa, synthetic construct
  REGION 1..10: note = Description of Artificial Sequence: Synthetic peptide
  REGION 1..10: note = Synthetic Construct
GYTFTSYWMH

SEQ ID NO: 2078 - protein, 17 aa, synthetic construct
  REGION 1..17: note = Description of Artificial Sequence: Synthetic peptide
  REGION 1..17: note = Synthetic Construct
RSDPTTGGTNYNEKFKT

SEQ ID NO: 2079 - protein, 7 aa, synthetic construct
  REGION 1..7: note = Description of Artificial Sequence: Synthetic peptide
  REGION 1..7: note = Synthetic Construct
KVSNRFS

SEQ ID NO: 2080 - protein, 10 aa, synthetic construct
  REGION 1..10: note = Description of Artificial Sequence: Synthetic peptide
  REGION 1..10: note = Synthetic Construct
GYTFTSYWIQ

SEQ ID NO: 2081 - protein, 17 aa, synthetic construct
  REGION 1..17: note = Description of Artificial Sequence: Synthetic peptide
  REGION 1..17: note = Synthetic Construct
TIYPGDGDARYTQKFKG

SEQ ID NO: 2082 - protein, 15 aa, synthetic construct
  REGION 1..15: note = Description of Artificial Sequence: Synthetic peptide
  REGION 1..15: note = Synthetic Construct
ARNGITTAGYYAMDY

SEQ ID NO: 2083 - protein, 11 aa, synthetic construct
  REGION 1..11: note = Description of Artificial Sequence: Synthetic peptide
  REGION 1..11: note = Synthetic Construct
RASENIYSNLA

SEQ ID NO: 2084 - protein, 7 aa, synthetic construct
  REGION 1..7: note = Description of Artificial Sequence: Synthetic peptide
  REGION 1..7: note = Synthetic Construct
AATNLAD

SEQ ID NO: 2085 - protein, 9 aa, synthetic construct
  REGION 1..9: note = Description of Artificial Sequence: Synthetic peptide
  REGION 1..9: note = Synthetic Construct
QHFWGTPYT

SEQ ID NO: 2086 - protein, 10 aa, synthetic construct
  REGION 1..10: note = Description of Artificial Sequence: Synthetic peptide
  REGION 1..10: note = Synthetic Construct
GYTFTDHAMH

SEQ ID NO: 2087 - protein, 17 aa, synthetic construct
  REGION 1..17: note = Description of Artificial Sequence: Synthetic peptide
  REGION 1..17: note = Synthetic Construct
VISTYSGDTGYNQKFKG

SEQ ID NO: 2088 - protein, 12 aa, synthetic construct
  REGION 1..12: note = Description of Artificial Sequence: Synthetic peptide
  REGION 1..12: note = Synthetic Construct
AREGHYDDAMDY

SEQ ID NO: 2089 - protein, 16 aa, synthetic construct
  REGION 1..16: note = Description of Artificial Sequence: Synthetic peptide
  REGION 1..16: note = Synthetic Construct
KSSQSLLDSDGKTYLN

SEQ ID NO: 2090 - protein, 7 aa, synthetic construct
  REGION 1..7: note = Description of Artificial Sequence: Synthetic peptide
  REGION 1..7: note = Synthetic Construct
VVSKLDS

SEQ ID NO: 2091 - protein, 9 aa, synthetic construct
  REGION 1..9: note = Description of Artificial Sequence: Synthetic peptide
  REGION 1..9: note = Synthetic Construct
WQGTHFPYT

SEQ ID NO: 2092 - protein, 10 aa, synthetic construct
  REGION 1..10: note = Description of Artificial Sequence: Synthetic peptide
  REGION 1..10: note = Synthetic Construct
GYTFTSYVMH

SEQ ID NO: 2093 - protein, 17 aa, synthetic construct
  REGION 1..17: note = Description of Artificial Sequence: Synthetic peptide
  REGION 1..17: note = Synthetic Construct
YINPYTDGTKYNEKFKG

SEQ ID NO: 2094 - protein, 12 aa, synthetic construct
  REGION 1..12: note = Description of Artificial Sequence: Synthetic peptide
  REGION 1..12: note = Synthetic Construct
ARGEVRRYALDY

SEQ ID NO: 2095 - protein, 11 aa, synthetic construct
  REGION 1..11: note = Description of Artificial Sequence: Synthetic peptide
  REGION 1..11: note = Synthetic Construct
KASEDIYNRLA

SEQ ID NO: 2096 - protein, 7 aa, synthetic construct
  REGION 1..7: note = Description of Artificial Sequence: Synthetic peptide
  REGION 1..7: note = Synthetic Construct
GATSLET

SEQ ID NO: 2097 - protein, 9 aa, synthetic construct
  REGION 1..9: note = Description of Artificial Sequence: Synthetic peptide
  REGION 1..9: note = Synthetic Construct
QQYWSTPWT

SEQ ID NO: 2098 - protein, 11 aa, synthetic construct
  REGION 1..11: note = Description of Artificial Sequence: Synthetic peptide
  REGION 1..11: note = Synthetic Construct
DSEVFPISYMS

SEQ ID NO: 2099 - protein, 15 aa, synthetic construct
  REGION 1..15: note = Description of Artificial Sequence: Synthetic peptide
  REGION 1..15: note = Synthetic Construct
DILPSIGGRIYGVKF

SEQ ID NO: 2100 - protein, 10 aa, synthetic construct
  REGION 1..10: note = Description of Artificial Sequence: Synthetic peptide
  REGION 1..10: note = Synthetic Construct
ARKDYGSLAY

SEQ ID NO: 2101 - protein, 16 aa, synthetic construct
  REGION 1..16: note = Description of Artificial Sequence: Synthetic peptide
  REGION 1..16: note = Synthetic Construct
RSSQSLVHINGNTYLQ

SEQ ID NO: 2102 - protein, 9 aa, synthetic construct
  REGION 1..9: note = Description of Artificial Sequence: Synthetic peptide
  REGION 1..9: note = Synthetic Construct
SQSTHVPYT

SEQ ID NO: 2103 - protein, 10 aa, synthetic construct
  REGION 1..10: note = Description of Artificial Sequence: Synthetic peptide
  REGION 1..10: note = Synthetic Construct
GYTLSEYTMH

SEQ ID NO: 2104 - protein, 17 aa, synthetic construct
  REGION 1..17: note = Description of Artificial Sequence: Synthetic peptide
  REGION 1..17: note = Synthetic Construct
GVIPNSGGTSYNQKFRD

SEQ ID NO: 2105 - protein, 15 aa, synthetic construct
  REGION 1..15: note = Description of Artificial Sequence: Synthetic peptide
  REGION 1..15: note = Synthetic Construct
ARGDDSYRRGYALDY

SEQ ID NO: 2106 - protein, 17 aa, synthetic construct
  REGION 1..17: note = Description of Artificial Sequence: Synthetic peptide
  REGION 1..17: note = Synthetic Construct
KSSQSLLYSSNQKSYLA

SEQ ID NO: 2107 - protein, 7 aa, synthetic construct
  REGION 1..7: note = Description of Artificial Sequence: Synthetic peptide
  REGION 1..7: note = Synthetic Construct
WASTRES

SEQ ID NO: 2108 - protein, 9 aa, synthetic construct
  REGION 1..9: note = Description of Artificial Sequence: Synthetic peptide
  REGION 1..9: note = Synthetic Construct
QQYFSYPPT

SEQ ID NO: 2109 - protein, 10 aa, synthetic construct
  REGION 1..10: note = Description of Artificial Sequence: Synthetic peptide
  REGION 1..10: note = Synthetic Construct
GFNIKDTYMH

SEQ ID NO: 2110 - protein, 17 aa, synthetic construct
  REGION 1..17: note = Description of Artificial Sequence: Synthetic peptide
  REGION 1..17: note = Synthetic Construct
RIDPANGNTKYDPKFQG

SEQ ID NO: 2111 - protein, 6 aa, synthetic construct
  REGION 1..6: note = Description of Artificial Sequence: Synthetic peptide
  REGION 1..6: note = Synthetic Construct
ATLFAY

SEQ ID NO: 2112 - protein, 16 aa, synthetic construct
  REGION 1..16: note = Description of Artificial Sequence: Synthetic peptide
  REGION 1..16: note = Synthetic Construct
RSSKSLLHSNGITYLY

SEQ ID NO: 2113 - protein, 7 aa, synthetic construct
  REGION 1..7: note = Description of Artificial Sequence: Synthetic peptide
  REGION 1..7: note = Synthetic Construct
QMSNLAS

SEQ ID NO: 2114 - protein, 8 aa, synthetic construct
  REGION 1..8: note = Description of Artificial Sequence: Synthetic peptide
  REGION 1..8: note = Synthetic Construct
AQNLELPT

SEQ ID NO: 2115 - protein, 11 aa, synthetic construct
  REGION 1..11: note = Description of Artificial Sequence: Synthetic peptide
  REGION 1..11: note = Synthetic Construct
GYSITSDYAWN

SEQ ID NO: 2116 - protein, 16 aa, synthetic construct
  REGION 1..16: note = Description of Artificial Sequence: Synthetic peptide
  REGION 1..16: note = Synthetic Construct
YINYSGRTIYNPSLKS

SEQ ID NO: 2117 - protein, 11 aa, synthetic construct
  REGION 1..11: note = Description of Artificial Sequence: Synthetic peptide
  REGION 1..11: note = Synthetic Construct
ARWNGNYGFAY

SEQ ID NO: 2118 - protein, 16 aa, synthetic construct
  REGION 1..16: note = Description of Artificial Sequence: Synthetic peptide
  REGION 1..16: note = Synthetic Construct
RSSQSLVHINGNTYLH

SEQ ID NO: 2119 - protein, 9 aa, synthetic construct
  REGION 1..9: note = Description of Artificial Sequence: Synthetic peptide
  REGION 1..9: note = Synthetic Construct
SQTTHALFT

SEQ ID NO: 2120 - protein, 16 aa, synthetic construct
  REGION 1..16: note = Description of Artificial Sequence: Synthetic peptide
  REGION 1..16: note = Synthetic Construct
YISFSGSTSYNPSLKS

SEQ ID NO: 2121 - protein, 9 aa, synthetic construct
  REGION 1..9: note = Description of Artificial Sequence: Synthetic peptide
  REGION 1..9: note = Synthetic Construct
SQSTHVTFT

SEQ ID NO: 2122 - protein, 11 aa, synthetic construct
  REGION 1..11: note = Description of Artificial Sequence: Synthetic peptide
  REGION 1..11: note = Synthetic Construct
DSEVFPIAYMS

SEQ ID NO: 2123 - protein, 17 aa, synthetic construct
  REGION 1..17: note = Description of Artificial Sequence: Synthetic peptide
  REGION 1..17: note = Synthetic Construct
DILPSIGRRIYGVKFED

SEQ ID NO: 2124 - protein, 8 aa, synthetic construct
  REGION 1..8: note = Description of Artificial Sequence: Synthetic peptide
  REGION 1..8: note = Synthetic Construct
KDYGSLAY

SEQ ID NO: 2125 - protein, 9 aa, synthetic construct
  REGION 1..9: note = Description of Artificial Sequence: Synthetic peptide
  REGION 1..9: note = Synthetic Construct
SQSTHLPYT

SEQ ID NO: 2126 - protein, 10 aa, synthetic construct
  REGION 1..10: note = Description of Artificial Sequence: Synthetic peptide
  REGION 1..10: note = Synthetic Construct
GFSLSRYSVY

SEQ ID NO: 2127 - protein, 16 aa, synthetic construct
  REGION 1..16: note = Description of Artificial Sequence: Synthetic peptide
  REGION 1..16: note = Synthetic Construct
MIWGGGNTDYNSALKS

SEQ ID NO: 2128 - protein, 6 aa, synthetic construct
  REGION 1..6: note = Description of Artificial Sequence: Synthetic peptide
  REGION 1..6: note = Synthetic Construct
YGGMDY

SEQ ID NO: 2129 - protein, 16 aa, synthetic construct
  REGION 1..16: note = Description of Artificial Sequence: Synthetic peptide
  REGION 1..16: note = Synthetic Construct
RSSQSIVHSNGNTYLE

SEQ ID NO: 2130 - protein, 9 aa, synthetic construct
  REGION 1..9: note = Description of Artificial Sequence: Synthetic peptide
  REGION 1..9: note = Synthetic Construct
FQGSHVPYT

SEQ ID NO: 2131 - protein, 223 aa, synthetic construct
  REGION 1..223: note = Description of Artificial Sequence: Synthetic polypeptide
  REGION 1..223: note = Synthetic Construct
QVQLQQPGAELVKPGASVKLSCKASGYTFTSYWMHWVKQSPGRGLEWIGRSDPTTGGTNYNEKFKTKATLTVDKPSSTAYMQLSSLTSDDSAVYYCVRTSGTGDYWGQGTSLTVSSASTKGPSVFPLAPSSKSTSGGTAALGCLVKDYFPEPVTVSWNSGALTSGVHTFPAVLQSSGLYSLSSVVTVPSSSLGTQTYICNVNHKPSNTKVDKKVEPKSCDKTH

SEQ ID NO: 2132 - protein, 446 aa, synthetic construct
  REGION 1..446: note = Description of Artificial Sequence: Synthetic polypeptide
  REGION 1..446: note = Synthetic Construct
QVQLQQPGAELVKPGASVKLSCKASGYTFTSYWMHWVKQSPGRGLEWIGRSDPTTGGTNYNEKFKTKATLTVDKPSSTAYMQLSSLTSDDSAVYYCVRTSGTGDYWGQGTSLTVSSASTKGPSVFPLAPSSKSTSGGTAALGCLVKDYFPEPVTVSWNSGALTSGVHTFPAVLQSSGLYSLSSVVTVPSSSLGTQTYICNVNHKPSNTKVDKKVEPKSCDKTHTCPPCPAPEAAGGPSVFLFPPKPKDTLMISRTPEVTCVVVDVSHEDPEVKFNWYVDGVEVHNAKTKPREEQYNSTYRVVSVLTVLHQDWLNGKEYKCKVSNKALGAPIEKTISKAKGQPREPQVYTLPPSRDELTKNQVSLWCLVKGFYPSDIAVLWESYGTEWASYKTTPPVLDSDGSFFLYSKLTVTKEEWQQGFVFSCSVMHEALHNHYTQKSLSLSPGK

SEQ ID NO: 2133 - protein, 446 aa, synthetic construct
  REGION 1..446: note = Description of Artificial Sequence: Synthetic polypeptide
  REGION 1..446: note = Synthetic Construct
QVQLQQPGAELVKPGASVKLSCKASGYTFTSYWMHWVKQSPGRGLEWIGRSDPTTGGTNYNEKFKTKATLTVDKPSSTAYMQLSSLTSDDSAVYYCVRTSGTGDYWGQGTSLTVSSASTKGPSVFPLAPSSKSTSGGTAALGCLVKDYFPEPVTVSWNSGALTSGVHTFPAVLQSSGLYSLSSVVTVPSSSLGTQTYICNVNHKPSNTKVDKKVEPKSCDKTHTCPPCPAPEAAGGPSVFLFPPKPKDTLMISRTPEVTCVVVDVSHEDPEVKFNWYVDGVEVHNAKTKPREEQYNSTYRVVSVLTVLHQDWLNGKEYKCKVSNKALGAPIEKTISKAKGQPREPQVYTLPPSRDELTKNQVSLSCAVKGFYPSDIAVEWESNGQPENNYKTTPPVLDSDGSFFLVSKLTVDKSRWQQGNVFSCSVMHEALHNHYTQKSLSLSPGK

SEQ ID NO: 2134 - protein, 229 aa, synthetic construct
  REGION 1..229: note = Description of Artificial Sequence: Synthetic polypeptide
  REGION 1..229: note = Synthetic Construct
EVQLQQSGPELVKPGASVKISCKTSGYTLSEYTMHWVIQSHGKSLEWIGGVIPNSGGTSYNQKFRDKASLTVDKSSSTAYLELRSLTSEDSAVYYCARGDDSYRRGYALDYWGQGTSVTVSSASTKGPSVFPLAPSSKSTSGGTAALGCLVKDYFPEPVTVSWNSGALTSGVHTFPAVLQSSGLYSLSSVVTVPSSSLGTQTYICNVNHKPSNTKVDKKVEPKSCDKTH

SEQ ID NO: 2135 - protein, 452 aa, synthetic construct
  REGION 1..452: note = Description of Artificial Sequence: Synthetic polypeptide
  REGION 1..452: note = Synthetic Construct
EVQLQQSGPELVKPGASVKISCKTSGYTLSEYTMHWVIQSHGKSLEWIGGVIPNSGGTSYNQKFRDKASLTVDKSSSTAYLELRSLTSEDSAVYYCARGDDSYRRGYALDYWGQGTSVTVSSASTKGPSVFPLAPSSKSTSGGTAALGCLVKDYFPEPVTVSWNSGALTSGVHTFPAVLQSSGLYSLSSVVTVPSSSLGTQTYICNVNHKPSNTKVDKKVEPKSCDKTHTCPPCPAPEAAGGPSVFLFPPKPKDTLMISRTPEVTCVVVDVSHEDPEVKFNWYVDGVEVHNAKTKPREEQYNSTYRVVSVLTVLHQDWLNGKEYKCKVSNKALGAPIEKTISKAKGQPREPQVYTLPPSRDELTKNQVSLWCLVKGFYPSDIAVLWESYGTEWASYKTTPPVLDSDGSFFLYSKLTVTKEEWQQGFVFSCSVMHEALHNHYTQKSLSLSPGK

SEQ ID NO: 2136 - protein, 452 aa, synthetic construct
  REGION 1..452: note = Description of Artificial Sequence: Synthetic polypeptide
  REGION 1..452: note = Synthetic Construct
EVQLQQSGPELVKPGASVKISCKTSGYTLSEYTMHWVIQSHGKSLEWIGGVIPNSGGTSYNQKFRDKASLTVDKSSSTAYLELRSLTSEDSAVYYCARGDDSYRRGYALDYWGQGTSVTVSSASTKGPSVFPLAPSSKSTSGGTAALGCLVKDYFPEPVTVSWNSGALTSGVHTFPAVLQSSGLYSLSSVVTVPSSSLGTQTYICNVNHKPSNTKVDKKVEPKSCDKTHTCPPCPAPEAAGGPSVFLFPPKPKDTLMISRTPEVTCVVVDVSHEDPEVKFNWYVDGVEVHNAKTKPREEQYNSTYRVVSVLTVLHQDWLNGKEYKCKVSNKALGAPIEKTISKAKGQPREPQVYTLPPSRDELTKNQVSLSCAVKGFYPSDIAVEWESNGQPENNYKTTPPVLDSDGSFFLVSKLTVDKSRWQQGNVFSCSVMHEALHNHYTQKSLSLSPGK

SEQ ID NO: 2137 - protein, 760 aa, Homo sapiens
MMDQARSAFSNLFGGEPLSYTRFSLARQVDGDNSHVEMKLAVDEEENADNNTKANVTKPKRCSGSICYGTIAVIVFFLIGFMIGYLGYCKGVEPKTECERLAGTESPVREEPGEDFPAARRLYWDDLKRKLSEKLDSTDFTGTIKLLNENSYVPREAGSQKDENLALYVENQFREFKLSKVWRDQHFVKIQVKDSAQNSVIIVDKNGRLVYLVENPGGYVAYSKAATVTGKLVHANFGTKKDFEDLYTPVNGSIVIVRAGKITFAEKVANAESLNAIGVLIYMDQTKFPIVNAELSFFGHAHLGTGDPYTPGFPSFNHTQFPPSRSSGLPNIPVQTISRAAAEKLFGNMEGDCPSDWKTDSTCRMVTSESKNVKLTVSNVLKEIKILNIFGVIKGFVEPDHYVVVGAQRDAWGPGAAKSGVGTALLLKLAQMFSDMVLKDGFQPSRSIIFASWSAGDFGSVGATEWLEGYLSSLHLKAFTYINLDKAVLGTSNFKVSASPLLYTLIEKTMQNVKHPVTGQFLYQDSNWASKVEKLTLDNAAFPFLAYSGIPAVSFCFCEDTDYPYLGTTMDTYKELIERIPELNKVARAAAEVAGQFVIKLTHDVELNLDYERYNSQLLSFVRDLNQYRADIKEMGLSLQWLYSARGDFFRATSRLTTDFGNAEKTDRFVMKKLNDRVMRVEYHFLSPYVSPKESPFRHVFWGSGSHTLPALLENLKLRKQNNGAFNETLFRNQLALATWTIQGAANALSGDVWDIDNEF

SEQ ID NO: 2138 - protein, 217 aa, Homo sapiens
APELLGGPSVFLFPPKPKDTLMISRTPEVTCVVVDVSHEDPEVKFNWYVDGVEVHNAKTKPREEQYNSTYRVVSVLTVLHQDWLNGKEYKCKVSNKALPAPIEKTISKAKGQPREPQVYTLPPSRDELTKNQVSLTCLVKGFYPSDIAVEWESNGQPENNYKTTPPVLDSDGSFFLYSKLTVDKSRWQQGNVFSCSVMHEALHNHYTQKSLSLSPGK

SEQ ID NO: 2139 - protein, 15 aa, Homo sapiens
EPKSCDKTHTCPPCP

SEQ ID NO: 2140 - protein, 217 aa, synthetic construct
  REGION 1..217: note = Description of Artificial Sequence: Synthetic polypeptide
  REGION 1..217: note = Synthetic Construct
APELLGGPSVFLFPPKPKDTLMISRTPEVTCVVVDVSHEDPEVKFNWYVDGVEVHNAKTKPREEQYNSTYRVVSVLTVLHQDWLNGKEYKCKVSNKALPAPIEKTISKAKGQPREPQVYTLPPSRDELTKNQVSLTCLVKGFYPSDIAVEWESYGTEWSSYKTTPPVLDSDGSFFLYSKLTVTKEEWQQGFVFSCSVMHEALHNHYTQKSLSLSPGK

SEQ ID NO: 2141 - protein, 217 aa, synthetic construct
  REGION 1..217: note = Description of Artificial Sequence: Synthetic polypeptide
  REGION 1..217: note = Synthetic Construct
APELLGGPSVFLFPPKPKDTLMISRTPEVTCVVVDVSHEDPEVKFNWYVDGVEVHNAKTKPREEQYNSTYRVVSVLTVLHQDWLNGKEYKCKVSNKALPAPIEKTISKAKGQPREPQVYTLPPSRDELTKNQVSLTCLVKGFYPSDIAVWWESYGTEWSSYKTTPPVLDSDGSFFLYSKLTVTKEEWQQGFVFSCSVMHEALHNHYTQKSLSLSPGK

SEQ ID NO: 2142 - protein, 217 aa, synthetic construct
  REGION 1..217: note = Description of Artificial Sequence: Synthetic polypeptide
  REGION 1..217: note = Synthetic Construct
APELLGGPSVFLFPPKPKDTLMISRTPEVTCVVVDVSHEDPEVKFNWYVDGVEVHNAKTKPREEQYNSTYRVVSVLTVLHQDWLNGKEYKCKVSNKALPAPIEKTISKAKGQPREPQVYTLPPSRDELTKNQVSLTCLVKGFYPSDIAVWWESYGTEWSNYKTTPPVLDSDGSFFLYSKLTVTKSEWQQGFVFSCSVMHEALHNHYTQKSLSLSPGK

SEQ ID NO: 2143 - protein, 217 aa, synthetic construct
  REGION 1..217: note = Description of Artificial Sequence: Synthetic polypeptide
  REGION 1..217: note = Synthetic Construct
APELLGGPSVFLFPPKPKDTLMISRTPEVTCVVVDVSHEDPEVKFNWYVDGVEVHNAKTKPREEQYNSTYRVVSVLTVLHQDWLNGKEYKCKVSNKALPAPIEKTISKAKGQPREPQVYTLPPSRDELTKNQVSLTCLVKGFYPSDIAVEWESYGTEWSNYKTTPPVLDSDGSFFLYSKLTVTKEEWQQGFVFSCSVMHEALHNHYTQKSLSLSPGK

SEQ ID NO: 2144 - protein, 217 aa, synthetic construct
  REGION 1..217: note = Description of Artificial Sequence: Synthetic polypeptide
  REGION 1..217: note = Synthetic Construct
APELLGGPSVFLFPPKPKDTLMISRTPEVTCVVVDVSHEDPEVKFNWYVDGVEVHNAKTKPREEQYNSTYRVVSVLTVLHQDWLNGKEYKCKVSNKALPAPIEKTISKAKGQPREPQVYTLPPSRDELTKNQVSLTCLVKGFYPSDIAVWWESYGTEWSNYKTTPPVLDSDGSFFLYSKLTVTKEEWQQGFVFSCSVMHEALHNHYTQKSLSLSPGK

SEQ ID NO: 2145 - protein, 217 aa, synthetic construct
  REGION 1..217: note = Description of Artificial Sequence: Synthetic polypeptide
  REGION 1..217: note = Synthetic Construct
APELLGGPSVFLFPPKPKDTLMISRTPEVTCVVVDVSHEDPEVKFNWYVDGVEVHNAKTKPREEQYNSTYRVVSVLTVLHQDWLNGKEYKCKVSNKALPAPIEKTISKAKGQPREPQVYTLPPSRDELTKNQVSLTCLVKGFYPSDIAVLWESYGTEWSSYKTTPPVLDSDGSFFLYSKLTVTKEEWQQGFVFSCSVMHEALHNHYTQKSLSLSPGK

SEQ ID NO: 2146 - protein, 217 aa, synthetic construct
  REGION 1..217: note = Description of Artificial Sequence: Synthetic polypeptide
  REGION 1..217: note = Synthetic Construct
APELLGGPSVFLFPPKPKDTLMISRTPEVTCVVVDVSHEDPEVKFNWYVDGVEVHNAKTKPREEQYNSTYRVVSVLTVLHQDWLNGKEYKCKVSNKALPAPIEKTISKAKGQPREPQVYTLPPSRDELTKNQVSLTCLVKGFYPSDIAVEWESFGTEWSSYKTTPPVLDSDGSFFLYSKLTVTKEEWQQGFVFSCSVMHEALHNHYTQKSLSLSPGK

SEQ ID NO: 2147 - protein, 217 aa, synthetic construct
  REGION 1..217: note = Description of Artificial Sequence: Synthetic polypeptide
  REGION 1..217: note = Synthetic Construct
APELLGGPSVFLFPPKPKDTLMISRTPEVTCVVVDVSHEDPEVKFNWYVDGVEVHNAKTKPREEQYNSTYRVVSVLTVLHQDWLNGKEYKCKVSNKALPAPIEKTISKAKGQPREPQVYTLPPSRDELTKNQVSLTCLVKGFYPSDIAVEWESYGTEWASYKTTPPVLDSDGSFFLYSKLTVTKEEWQQGFVFSCSVMHEALHNHYTQKSLSLSPGK

SEQ ID NO: 2148 - protein, 217 aa, synthetic construct
  REGION 1..217: note = Description of Artificial Sequence: Synthetic polypeptide
  REGION 1..217: note = Synthetic Construct
APELLGGPSVFLFPPKPKDTLMISRTPEVTCVVVDVSHEDPEVKFNWYVDGVEVHNAKTKPREEQYNSTYRVVSVLTVLHQDWLNGKEYKCKVSNKALPAPIEKTISKAKGQPREPQVYTLPPSRDELTKNQVSLTCLVKGFYPSDIAVEWESYGTEWVSYKTTPPVLDSDGSFFLYSKLTVTKEEWQQGFVFSCSVMHEALHNHYTQKSLSLSPGK

SEQ ID NO: 2149 - protein, 217 aa, synthetic construct
  REGION 1..217: note = Description of Artificial Sequence: Synthetic polypeptide
  REGION 1..217: note = Synthetic Construct
APELLGGPSVFLFPPKPKDTLMISRTPEVTCVVVDVSHEDPEVKFNWYVDGVEVHNAKTKPREEQYNSTYRVVSVLTVLHQDWLNGKEYKCKVSNKALPAPIEKTISKAKGQPREPQVYTLPPSRDELTKNQVSLTCLVKGFYPSDIAVEWESYGTEWSSYKTTPPVLDSDGSFFLYSKLTVSKEEWQQGFVFSCSVMHEALHNHYTQKSLSLSPGK

SEQ ID NO: 2150 - protein, 217 aa, synthetic construct
  REGION 1..217: note = Description of Artificial Sequence: Synthetic polypeptide
  REGION 1..217: note = Synthetic Construct
APELLGGPSVFLFPPKPKDTLMISRTPEVTCVVVDVSHEDPEVKFNWYVDGVEVHNAKTKPREEQYNSTYRVVSVLTVLHQDWLNGKEYKCKVSNKALPAPIEKTISKAKGQPREPQVYTLPPSRDELTKNQVSLTCLVKGFYPSDIAVEWESFGTEWASYKTTPPVLDSDGSFFLYSKLTVTKEEWQQGFVFSCSVMHEALHNHYTQKSLSLSPGK

SEQ ID NO: 2151 - protein, 217 aa, synthetic construct
  REGION 1..217: note = Description of Artificial Sequence: Synthetic polypeptide
  REGION 1..217: note = Synthetic Construct
APELLGGPSVFLFPPKPKDTLMISRTPEVTCVVVDVSHEDPEVKFNWYVDGVEVHNAKTKPREEQYNSTYRVVSVLTVLHQDWLNGKEYKCKVSNKALPAPIEKTISKAKGQPREPQVYTLPPSRDELTKNQVSLTCLVKGFYPSDIAVEWESFGTEWVSYKTTPPVLDSDGSFFLYSKLTVTKEEWQQGFVFSCSVMHEALHNHYTQKSLSLSPGK

SEQ ID NO: 2152 - protein, 217 aa, synthetic construct
  REGION 1..217: note = Description of Artificial Sequence: Synthetic polypeptide
  REGION 1..217: note = Synthetic Construct
APELLGGPSVFLFPPKPKDTLMISRTPEVTCVVVDVSHEDPEVKFNWYVDGVEVHNAKTKPREEQYNSTYRVVSVLTVLHQDWLNGKEYKCKVSNKALPAPIEKTISKAKGQPREPQVYTLPPSRDELTKNQVSLTCLVKGFYPSDIAVWWESFGTEWSSYKTTPPVLDSDGSFFLYSKLTVTKEEWQQGFVFSCSVMHEALHNHYTQKSLSLSPGK

SEQ ID NO: 2153 - protein, 217 aa, synthetic construct
  REGION 1..217: note = Description of Artificial Sequence: Synthetic polypeptide
  REGION 1..217: note = Synthetic Construct
APELLGGPSVFLFPPKPKDTLMISRTPEVTCVVVDVSHEDPEVKFNWYVDGVEVHNAKTKPREEQYNSTYRVVSVLTVLHQDWLNGKEYKCKVSNKALPAPIEKTISKAKGQPREPQVYTLPPSRDELTKNQVSLTCLVKGFYPSDIAVWWESYGTEWASYKTTPPVLDSDGSFFLYSKLTVTKEEWQQGFVFSCSVMHEALHNHYTQKSLSLSPGK

SEQ ID NO: 2154 - protein, 217 aa, synthetic construct
  REGION 1..217: note = Description of Artificial Sequence: Synthetic polypeptide
  REGION 1..217: note = Synthetic Construct
APELLGGPSVFLFPPKPKDTLMISRTPEVTCVVVDVSHEDPEVKFNWYVDGVEVHNAKTKPREEQYNSTYRVVSVLTVLHQDWLNGKEYKCKVSNKALPAPIEKTISKAKGQPREPQVYTLPPSRDELTKNQVSLTCLVKGFYPSDIAVWWESYGTEWVSYKTTPPVLDSDGSFFLYSKLTVTKEEWQQGFVFSCSVMHEALHNHYTQKSLSLSPGK

SEQ ID NO: 2155 - protein, 217 aa, synthetic construct
  REGION 1..217: note = Description of Artificial Sequence: Synthetic polypeptide
  REGION 1..217: note = Synthetic Construct
APELLGGPSVFLFPPKPKDTLMISRTPEVTCVVVDVSHEDPEVKFNWYVDGVEVHNAKTKPREEQYNSTYRVVSVLTVLHQDWLNGKEYKCKVSNKALPAPIEKTISKAKGQPREPQVYTLPPSRDELTKNQVSLTCLVKGFYPSDIAVWWESYGTEWSSYKTTPPVLDSDGSFFLYSKLTVSKEEWQQGFVFSCSVMHEALHNHYTQKSLSLSPGK

SEQ ID NO: 2156 - protein, 217 aa, synthetic construct
  REGION 1..217: note = Description of Artificial Sequence: Synthetic polypeptide
  REGION 1..217: note = Synthetic Construct
APELLGGPSVFLFPPKPKDTLMISRTPEVTCVVVDVSHEDPEVKFNWYVDGVEVHNAKTKPREEQYNSTYRVVSVLTVLHQDWLNGKEYKCKVSNKALPAPIEKTISKAKGQPREPQVYTLPPSRDELTKNQVSLTCLVKGFYPSDIAVWWESFGTEWASYKTTPPVLDSDGSFFLYSKLTVTKEEWQQGFVFSCSVMHEALHNHYTQKSLSLSPGK

SEQ ID NO: 2157 - protein, 217 aa, synthetic construct
  REGION 1..217: note = Description of Artificial Sequence: Synthetic polypeptide
  REGION 1..217: note = Synthetic Construct
APELLGGPSVFLFPPKPKDTLMISRTPEVTCVVVDVSHEDPEVKFNWYVDGVEVHNAKTKPREEQYNSTYRVVSVLTVLHQDWLNGKEYKCKVSNKALPAPIEKTISKAKGQPREPQVYTLPPSRDELTKNQVSLTCLVKGFYPSDIAVWWESFGTEWVSYKTTPPVLDSDGSFFLYSKLTVTKEEWQQGFVFSCSVMHEALHNHYTQKSLSLSPGK

SEQ ID NO: 2158 - protein, 217 aa, synthetic construct
  REGION 1..217: note = Description of Artificial Sequence: Synthetic polypeptide
  REGION 1..217: note = Synthetic Construct
APELLGGPSVFLFPPKPKDTLMISRTPEVTCVVVDVSHEDPEVKFNWYVDGVEVHNAKTKPREEQYNSTYRVVSVLTVLHQDWLNGKEYKCKVSNKALPAPIEKTISKAKGQPREPQVYTLPPSRDELTKNQVSLTCLVKGFYPSDIAVEWESFGTEWSNYKTTPPVLDSDGSFFLYSKLTVTKEEWQQGFVFSCSVMHEALHNHYTQKSLSLSPGK

SEQ ID NO: 2159 - protein, 217 aa, synthetic construct
  REGION 1..217: note = Description of Artificial Sequence: Synthetic polypeptide
  REGION 1..217: note = Synthetic Construct
APELLGGPSVFLFPPKPKDTLMISRTPEVTCVVVDVSHEDPEVKFNWYVDGVEVHNAKTKPREEQYNSTYRVVSVLTVLHQDWLNGKEYKCKVSNKALPAPIEKTISKAKGQPREPQVYTLPPSRDELTKNQVSLTCLVKGFYPSDIAVEWESYGTEWANYKTTPPVLDSDGSFFLYSKLTVTKEEWQQGFVFSCSVMHEALHNHYTQKSLSLSPGK

SEQ ID NO: 2160 - protein, 217 aa, synthetic construct
  REGION 1..217: note = Description of Artificial Sequence: Synthetic polypeptide
  REGION 1..217: note = Synthetic Construct
APELLGGPSVFLFPPKPKDTLMISRTPEVTCVVVDVSHEDPEVKFNWYVDGVEVHNAKTKPREEQYNSTYRVVSVLTVLHQDWLNGKEYKCKVSNKALPAPIEKTISKAKGQPREPQVYTLPPSRDELTKNQVSLTCLVKGFYPSDIAVEWESYGTEWVNYKTTPPVLDSDGSFFLYSKLTVTKEEWQQGFVFSCSVMHEALHNHYTQKSLSLSPGK

SEQ ID NO: 2161 - protein, 217 aa, synthetic construct
  REGION 1..217: note = Description of Artificial Sequence: Synthetic polypeptide
  REGION 1..217: note = Synthetic Construct
APELLGGPSVFLFPPKPKDTLMISRTPEVTCVVVDVSHEDPEVKFNWYVDGVEVHNAKTKPREEQYNSTYRVVSVLTVLHQDWLNGKEYKCKVSNKALPAPIEKTISKAKGQPREPQVYTLPPSRDELTKNQVSLTCLVKGFYPSDIAVEWESYGTEWSNYKTTPPVLDSDGSFFLYSKLTVSKEEWQQGFVFSCSVMHEALHNHYTQKSLSLSPGK

SEQ ID NO: 2162 - protein, 217 aa, synthetic construct
  REGION 1..217: note = Description of Artificial Sequence: Synthetic polypeptide
  REGION 1..217: note = Synthetic Construct
APELLGGPSVFLFPPKPKDTLMISRTPEVTCVVVDVSHEDPEVKFNWYVDGVEVHNAKTKPREEQYNSTYRVVSVLTVLHQDWLNGKEYKCKVSNKALPAPIEKTISKAKGQPREPQVYTLPPSRDELTKNQVSLTCLVKGFYPSDIAVEWESFGTEWANYKTTPPVLDSDGSFFLYSKLTVTKEEWQQGFVFSCSVMHEALHNHYTQKSLSLSPGK

SEQ ID NO: 2163 - protein, 217 aa, synthetic construct
  REGION 1..217: note = Description of Artificial Sequence: Synthetic polypeptide
  REGION 1..217: note = Synthetic Construct
APELLGGPSVFLFPPKPKDTLMISRTPEVTCVVVDVSHEDPEVKFNWYVDGVEVHNAKTKPREEQYNSTYRVVSVLTVLHQDWLNGKEYKCKVSNKALPAPIEKTISKAKGQPREPQVYTLPPSRDELTKNQVSLTCLVKGFYPSDIAVEWESFGTEWVNYKTTPPVLDSDGSFFLYSKLTVTKEEWQQGFVFSCSVMHEALHNHYTQKSLSLSPGK

SEQ ID NO: 2164 - protein, 217 aa, synthetic construct
  REGION 1..217: note = Description of Artificial Sequence: Synthetic polypeptide
  REGION 1..217: note = Synthetic Construct
APELLGGPSVFLFPPKPKDTLMISRTPEVTCVVVDVSHEDPEVKFNWYVDGVEVHNAKTKPREEQYNSTYRVVSVLTVLHQDWLNGKEYKCKVSNKALPAPIEKTISKAKGQPREPQVYTLPPSRDELTKNQVSLTCLVKGFYPSDIAVWWESFGTEWSNYKTTPPVLDSDGSFFLYSKLTVTKEEWQQGFVFSCSVMHEALHNHYTQKSLSLSPGK

SEQ ID NO: 2165 - protein, 217 aa, synthetic construct
  REGION 1..217: note = Description of Artificial Sequence: Synthetic polypeptide
  REGION 1..217: note = Synthetic Construct
APELLGGPSVFLFPPKPKDTLMISRTPEVTCVVVDVSHEDPEVKFNWYVDGVEVHNAKTKPREEQYNSTYRVVSVLTVLHQDWLNGKEYKCKVSNKALPAPIEKTISKAKGQPREPQVYTLPPSRDELTKNQVSLTCLVKGFYPSDIAVWWESYGTEWANYKTTPPVLDSDGSFFLYSKLTVTKEEWQQGFVFSCSVMHEALHNHYTQKSLSLSPGK

SEQ ID NO: 2166 - protein, 217 aa, synthetic construct
  REGION 1..217: note = Description of Artificial Sequence: Synthetic polypeptide
  REGION 1..217: note = Synthetic Construct
APELLGGPSVFLFPPKPKDTLMISRTPEVTCVVVDVSHEDPEVKFNWYVDGVEVHNAKTKPREEQYNSTYRVVSVLTVLHQDWLNGKEYKCKVSNKALPAPIEKTISKAKGQPREPQVYTLPPSRDELTKNQVSLTCLVKGFYPSDIAVWWESYGTEWVNYKTTPPVLDSDGSFFLYSKLTVTKEEWQQGFVFSCSVMHEALHNHYTQKSLSLSPGK

SEQ ID NO: 2167 - protein, 217 aa, synthetic construct
  REGION 1..217: note = Description of Artificial Sequence: Synthetic polypeptide
  REGION 1..217: note = Synthetic Construct
APELLGGPSVFLFPPKPKDTLMISRTPEVTCVVVDVSHEDPEVKFNWYVDGVEVHNAKTKPREEQYNSTYRVVSVLTVLHQDWLNGKEYKCKVSNKALPAPIEKTISKAKGQPREPQVYTLPPSRDELTKNQVSLTCLVKGFYPSDIAVWWESYGTEWSNYKTTPPVLDSDGSFFLYSKLTVSKEEWQQGFVFSCSVMHEALHNHYTQKSLSLSPGK

SEQ ID NO: 2168 - protein, 217 aa, synthetic construct
  REGION 1..217: note = Description of Artificial Sequence: Synthetic polypeptide
  REGION 1..217: note = Synthetic Construct
APELLGGPSVFLFPPKPKDTLMISRTPEVTCVVVDVSHEDPEVKFNWYVDGVEVHNAKTKPREEQYNSTYRVVSVLTVLHQDWLNGKEYKCKVSNKALPAPIEKTISKAKGQPREPQVYTLPPSRDELTKNQVSLTCLVKGFYPSDIAVWWESFGTEWANYKTTPPVLDSDGSFFLYSKLTVTKEEWQQGFVFSCSVMHEALHNHYTQKSLSLSPGK

SEQ ID NO: 2169 - protein, 217 aa, synthetic construct
  REGION 1..217: note = Description of Artificial Sequence: Synthetic polypeptide
  REGION 1..217: note = Synthetic Construct
APELLGGPSVFLFPPKPKDTLMISRTPEVTCVVVDVSHEDPEVKFNWYVDGVEVHNAKTKPREEQYNSTYRVVSVLTVLHQDWLNGKEYKCKVSNKALPAPIEKTISKAKGQPREPQVYTLPPSRDELTKNQVSLTCLVKGFYPSDIAVWWESFGTEWVNYKTTPPVLDSDGSFFLYSKLTVTKEEWQQGFVFSCSVMHEALHNHYTQKSLSLSPGK

SEQ ID NO: 2170 - protein, 217 aa, synthetic construct
  REGION 1..217: note = Description of Artificial Sequence: Synthetic polypeptide
  REGION 1..217: note = Synthetic Construct
APELLGGPSVFLFPPKPKDTLMISRTPEVTCVVVDVSHEDPEVKFNWYVDGVEVHNAKTKPREEQYNSTYRVVSVLTVLHQDWLNGKEYKCKVSNKALPAPIEKTISKAKGQPREPQVYTLPPSRDELTKNQVSLTCLVKGFYPSDIAVLWESFGTEWSSYKTTPPVLDSDGSFFLYSKLTVTKEEWQQGFVFSCSVMHEALHNHYTQKSLSLSPGK

SEQ ID NO: 2171 - protein, 217 aa, synthetic construct
  REGION 1..217: note = Description of Artificial Sequence: Synthetic polypeptide
  REGION 1..217: note = Synthetic Construct
APELLGGPSVFLFPPKPKDTLMISRTPEVTCVVVDVSHEDPEVKFNWYVDGVEVHNAKTKPREEQYNSTYRVVSVLTVLHQDWLNGKEYKCKVSNKALPAPIEKTISKAKGQPREPQVYTLPPSRDELTKNQVSLTCLVKGFYPSDIAVLWESYGTEWASYKTTPPVLDSDGSFFLYSKLTVTKEEWQQGFVFSCSVMHEALHNHYTQKSLSLSPGK

SEQ ID NO: 2172 - protein, 217 aa, synthetic construct
  REGION 1..217: note = Description of Artificial Sequence: Synthetic polypeptide
  REGION 1..217: note = Synthetic Construct
APELLGGPSVFLFPPKPKDTLMISRTPEVTCVVVDVSHEDPEVKFNWYVDGVEVHNAKTKPREEQYNSTYRVVSVLTVLHQDWLNGKEYKCKVSNKALPAPIEKTISKAKGQPREPQVYTLPPSRDELTKNQVSLTCLVKGFYPSDIAVLWESYGTEWVSYKTTPPVLDSDGSFFLYSKLTVTKEEWQQGFVFSCSVMHEALHNHYTQKSLSLSPGK

SEQ ID NO: 2173 - protein, 217 aa, synthetic construct
  REGION 1..217: note = Description of Artificial Sequence: Synthetic polypeptide
  REGION 1..217: note = Synthetic Construct
APELLGGPSVFLFPPKPKDTLMISRTPEVTCVVVDVSHEDPEVKFNWYVDGVEVHNAKTKPREEQYNSTYRVVSVLTVLHQDWLNGKEYKCKVSNKALPAPIEKTISKAKGQPREPQVYTLPPSRDELTKNQVSLTCLVKGFYPSDIAVLWESYGTEWSSYKTTPPVLDSDGSFFLYSKLTVSKEEWQQGFVFSCSVMHEALHNHYTQKSLSLSPGK

SEQ ID NO: 2174 - protein, 217 aa, synthetic construct
  REGION 1..217: note = Description of Artificial Sequence: Synthetic polypeptide
  REGION 1..217: note = Synthetic Construct
APELLGGPSVFLFPPKPKDTLMISRTPEVTCVVVDVSHEDPEVKFNWYVDGVEVHNAKTKPREEQYNSTYRVVSVLTVLHQDWLNGKEYKCKVSNKALPAPIEKTISKAKGQPREPQVYTLPPSRDELTKNQVSLTCLVKGFYPSDIAVLWESFGTEWASYKTTPPVLDSDGSFFLYSKLTVTKEEWQQGFVFSCSVMHEALHNHYTQKSLSLSPGK

SEQ ID NO: 2175 - protein, 217 aa, synthetic construct
  REGION 1..217: note = Description of Artificial Sequence: Synthetic polypeptide
  REGION 1..217: note = Synthetic Construct
APELLGGPSVFLFPPKPKDTLMISRTPEVTCVVVDVSHEDPEVKFNWYVDGVEVHNAKTKPREEQYNSTYRVVSVLTVLHQDWLNGKEYKCKVSNKALPAPIEKTISKAKGQPREPQVYTLPPSRDELTKNQVSLTCLVKGFYPSDIAVLWESFGTEWVSYKTTPPVLDSDGSFFLYSKLTVTKEEWQQGFVFSCSVMHEALHNHYTQKSLSLSPGK

SEQ ID NO: 2176 - protein, 217 aa, synthetic construct
  REGION 1..217: note = Description of Artificial Sequence: Synthetic polypeptide
  REGION 1..217: note = Synthetic Construct
APELLGGPSVFLFPPKPKDTLMISRTPEVTCVVVDVSHEDPEVKFNWYVDGVEVHNAKTKPREEQYNSTYRVVSVLTVLHQDWLNGKEYKCKVSNKALPAPIEKTISKAKGQPREPQVYTLPPSRDELTKNQVSLTCLVKGFYPSDIAVEWESYGTEWSNYKTTPPVLDSDGSFFLYSKLTVTKSEWQQGFVFSCSVMHEALHNHYTQKSLSLSPGK

SEQ ID NO: 2177 - protein, 217 aa, synthetic construct
  REGION 1..217: note = Description of Artificial Sequence: Synthetic polypeptide
  REGION 1..217: note = Synthetic Construct
APELLGGPSVFLFPPKPKDTLMISRTPEVTCVVVDVSHEDPEVKFNWYVDGVEVHNAKTKPREEQYNSTYRVVSVLTVLHQDWLNGKEYKCKVSNKALPAPIEKTISKAKGQPREPQVYTLPPSRDELTKNQVSLTCLVKGFYPSDIAVEWESLGLVWVGYKTTPPVLDSDGSFFLYSKLTVAKSTWQQGWVFSCSVMHEALHNHYTQKSLSLSPGK

SEQ ID NO: 2178 - protein, 217 aa, synthetic construct
  REGION 1..217: note = Description of Artificial Sequence: Synthetic polypeptide
  REGION 1..217: note = Synthetic Construct
APELLGGPSVFLFPPKPKDTLMISRTPEVTCVVVDVSHEDPEVKFNWYVDGVEVHNAKTKPREEQYNSTYRVVSVLTVLHQDWLNGKEYKCKVSNKALPAPIEKTISKAKGQPREPQVYTLPPSRDELTKNQVSLTCLVKGFYPSDIAVEWESYGTVWSHYKTTPPVLDSDGSFFLYSKLTVSKSEWQQGYVFSCSVMHEALHNHYTQKSLSLSPGK

SEQ ID NO: 2179 - protein, 217 aa, synthetic construct
  REGION 1..217: note = Description of Artificial Sequence: Synthetic polypeptide
  REGION 1..217: note = Synthetic Construct
APELLGGPSVFLFPPKPKDTLMISRTPEVTCVVVDVSHEDPEVKFNWYVDGVEVHNAKTKPREEQYNSTYRVVSVLTVLHQDWLNGKEYKCKVSNKALPAPIEKTISKAKGQPREPQVYTLPPSRDELTKNQVSLTCLVKGFYPSDIAVEWESYGTEWSQYKTTPPVLDSDGSFFLYSKLTVEKSDWQQGHVFSCSVMHEALHNHYTQKSLSLSPGK

SEQ ID NO: 2180 - protein, 217 aa, synthetic construct
  REGION 1..217: note = Description of Artificial Sequence: Synthetic polypeptide
  REGION 1..217: note = Synthetic Construct
APELLGGPSVFLFPPKPKDTLMISRTPEVTCVVVDVSHEDPEVKFNWYVDGVEVHNAKTKPREEQYNSTYRVVSVLTVLHQDWLNGKEYKCKVSNKALPAPIEKTISKAKGQPREPQVYTLPPSRDELTKNQVSLTCLVKGFYPSDIAVEWESVGTPWALYKTTPPVLDSDGSFFLYSKLTVLKSEWQQGWVFSCSVMHEALHNHYTQKSLSLSPGK

SEQ ID NO: 2181 - protein, 217 aa, synthetic construct
  REGION 1..217: note = Description of Artificial Sequence: Synthetic polypeptide
  REGION 1..217: note = Synthetic Construct
APELLGGPSVFLFPPKPKDTLMISRTPEVTCVVVDVSHEDPEVKFNWYVDGVEVHNAKTKPREEQYNSTYRVVSVLTVLHQDWLNGKEYKCKVSNKALPAPIEKTISKAKGQPREPQVYTLPPSRDELTKNQVSLTCLVKGFYPSDIAVEWESYGTVWSKYKTTPPVLDSDGSFFLYSKLTVSKSEWQQGFVFSCSVMHEALHNHYTQKSLSLSPGK

SEQ ID NO: 2182 - protein, 217 aa, synthetic construct
  REGION 1..217: note = Description of Artificial Sequence: Synthetic polypeptide
  REGION 1..217: note = Synthetic Construct
APELLGGPSVFLFPPKPKDTLMISRTPEVTCVVVDVSHEDPEVKFNWYVDGVEVHNAKTKPREEQYNSTYRVVSVLTVLHQDWLNGKEYKCKVSNKALPAPIEKTISKAKGQPREPQVYTLPPSRDELTKNQVSLTCLVKGFYPSDIAVEWESLGHVWAVYKTTPPVLDSDGSFFLYSKLTVPKSTWQQGWVFSCSVMHEALHNHYTQKSLSLSPGK

SEQ ID NO: 2183 - protein, 217 aa, synthetic construct
  REGION 1..217: note = Description of Artificial Sequence: Synthetic polypeptide
  REGION 1..217: note = Synthetic Construct
APELLGGPSVFLFPPKPKDTLMISRTPEVTCVVVDVSHEDPEVKFNWYVDGVEVHNAKTKPREEQYNSTYRVVSVLTVLHQDWLNGKEYKCKVSNKALPAPIEKTISKAKGQPREPQVYTLPPSRDELTKNQVSLTCLVKGFYPSDIAVEWESLGLVWVGYKTTPPVLDSDGSFFLYSKLTVPKSTWQQGWVFSCSVMHEALHNHYTQKSLSLSPGK

SEQ ID NO: 2184 - protein, 217 aa, synthetic construct
  REGION 1..217: note = Description of Artificial Sequence: Synthetic polypeptide
  REGION 1..217: note = Synthetic Construct
APELLGGPSVFLFPPKPKDTLMISRTPEVTCVVVDVSHEDPEVKFNWYVDGVEVHNAKTKPREEQYNSTYRVVSVLTVLHQDWLNGKEYKCKVSNKALPAPIEKTISKAKGQPREPQVYTLPPSRDELTKNQVSLTCLVKGFYPSDIAVEWESMGHVWVGYKTTPPVLDSDGSFFLYSKLTVDKSTWQQGWVFSCSVMHEALHNHYTQKSLSLSPGK

SEQ ID NO: 2185 - protein, 217 aa, synthetic construct
  REGION 1..217: note = Description of Artificial Sequence: Synthetic polypeptide
  REGION 1..217: note = Synthetic Construct
APELLGGPSVFLFPPKPKDTLMISRTPEVTCVVVDVSHEDPEVKFNWYVDGVEVHNAKTKPREEQYNSTYRVVSVLTVLHQDWLNGKEYKCKVSNKALPAPIEKTISKAKGQPREPQVYTLPPSRDELTKNQVSLTCLVKGFYPSDIAVEWESLGLVWVFSKTTPPVLDSDGSFFLYSKLTVPKSTWQQGWVFSCSVMHEALHNHYTQKSLSLSPGK

SEQ ID NO: 2186 - protein, 217 aa, synthetic construct
  REGION 1..217: note = Description of Artificial Sequence: Synthetic polypeptide
  REGION 1..217: note = Synthetic Construct
APELLGGPSVFLFPPKPKDTLMISRTPEVTCVVVDVSHEDPEVKFNWYVDGVEVHNAKTKPREEQYNSTYRVVSVLTVLHQDWLNGKEYKCKVSNKALPAPIEKTISKAKGQPREPQVYTLPPSRDELTKNQVSLTCLVKGFYPSDIAVEWESYGTEWSSYKTTPPVLDSDGSFFLYSKLTVTKSEWQQGFVFSCSVMHEALHNHYTQKSLSLSPGK

SEQ ID NO: 2187 - protein, 217 aa, synthetic construct
  REGION 1..217: note = Description of Artificial Sequence: Synthetic polypeptide
  REGION 1..217: note = Synthetic Construct
APELLGGPSVFLFPPKPKDTLMISRTPEVTCVVVDVSHEDPEVKFNWYVDGVEVHNAKTKPREEQYNSTYRVVSVLTVLHQDWLNGKEYKCKVSNKALPAPIEKTISKAKGQPREPQVYTLPPSRDELTKNQVSLTCLVKGFYPSDIAVEWESYGTEWSNYKTTPPVLDSDGSFFLYSKLTVSKSEWQQGFVFSCSVMHEALHNHYTQKSLSLSPGK

SEQ ID NO: 2188 - protein, 217 aa, synthetic construct
  REGION 1..217: note = Description of Artificial Sequence: Synthetic polypeptide
  REGION 1..217: note = Synthetic Construct
APELLGGPSVFLFPPKPKDTLMISRTPEVTCVVVDVSHEDPEVKFNWYVDGVEVHNAKTKPREEQYNSTYRVVSVLTVLHQDWLNGKEYKCKVSNKALPAPIEKTISKAKGQPREPQVYTLPPSRDELTKNQVSLTCLVKGFYPSDIAVEWESLGHVWVGYKTTPPVLDSDGSFFLYSKLTVSKSEWQQGWVFSCSVMHEALHNHYTQKSLSLSPGK

SEQ ID NO: 2189 - protein, 217 aa, synthetic construct
  REGION 1..217: note = Description of Artificial Sequence: Synthetic polypeptide
  REGION 1..217: note = Synthetic Construct
APELLGGPSVFLFPPKPKDTLMISRTPEVTCVVVDVSHEDPEVKFNWYVDGVEVHNAKTKPREEQYNSTYRVVSVLTVLHQDWLNGKEYKCKVSNKALPAPIEKTISKAKGQPREPQVYTLPPSRDELTKNQVSLTCLVKGFYPSDIAVEWESLGHVWVATKTTPPVLDSDGSFFLYSKLTVPKSTWQQGWVFSCSVMHEALHNHYTQKSLSLSPGK

SEQ ID NO: 2190 - protein, 217 aa, synthetic construct
  REGION 1..217: note = Description of Artificial Sequence: Synthetic polypeptide
  REGION 1..217: note = Synthetic Construct
APELLGGPSVFLFPPKPKDTLMISRTPEVTCVVVDVSHEDPEVKFNWYVDGVEVHNAKTKPREEQYNSTYRVVSVLTVLHQDWLNGKEYKCKVSNKALPAPIEKTISKAKGQPREPQVYTLPPSRDELTKNQVSLTCLVKGFYPSDIAVEWESLGPVWVHTKTTPPVLDSDGSFFLYSKLTVPKSTWQQGWVFSCSVMHEALHNHYTQKSLSLSPGK

SEQ ID NO: 2191 - protein, 217 aa, synthetic construct
  REGION 1..217: note = Description of Artificial Sequence: Synthetic polypeptide
  REGION 1..217: note = Synthetic Construct
APELLGGPSVFLFPPKPKDTLMISRTPEVTCVVVDVSHEDPEVKFNWYVDGVEVHNAKTKPREEQYNSTYRVVSVLTVLHQDWLNGKEYKCKVSNKALPAPIEKTISKAKGQPREPQVYTLPPSRDELTKNQVSLTCLVKGFYPSDIAVEWESLGHVWVDQKTTPPVLDSDGSFFLYSKLTVPKSTWQQGWVFSCSVMHEALHNHYTQKSLSLSPGK

SEQ ID NO: 2192 - protein, 217 aa, synthetic construct
  REGION 1..217: note = Description of Artificial Sequence: Synthetic polypeptide
  REGION 1..217: note = Synthetic Construct
APELLGGPSVFLFPPKPKDTLMISRTPEVTCVVVDVSHEDPEVKFNWYVDGVEVHNAKTKPREEQYNSTYRVVSVLTVLHQDWLNGKEYKCKVSNKALPAPIEKTISKAKGQPREPQVYTLPPSRDELTKNQVSLTCLVKGFYPSDIAVEWESLGHVWVNQKTTPPVLDSDGSFFLYSKLTVPKSTWQQGWVFSCSVMHEALHNHYTQKSLSLSPGK

SEQ ID NO: 2193 - protein, 217 aa, synthetic construct
  REGION 1..217: note = Description of Artificial Sequence: Synthetic polypeptide
  REGION 1..217: note = Synthetic Construct
APELLGGPSVFLFPPKPKDTLMISRTPEVTCVVVDVSHEDPEVKFNWYVDGVEVHNAKTKPREEQYNSTYRVVSVLTVLHQDWLNGKEYKCKVSNKALPAPIEKTISKAKGQPREPQVYTLPPSRDELTKNQVSLTCLVKGFYPSDIAVEWESLGHVWVNFKTTPPVLDSDGSFFLYSKLTVPKSTWQQGWVFSCSVMHEALHNHYTQKSLSLSPGK

SEQ ID NO: 2194 - protein, 217 aa, synthetic construct
  REGION 1..217: note = Description of Artificial Sequence: Synthetic polypeptide
  REGION 1..217: note = Synthetic Construct
APELLGGPSVFLFPPKPKDTLMISRTPEVTCVVVDVSHEDPEVKFNWYVDGVEVHNAKTKPREEQYNSTYRVVSVLTVLHQDWLNGKEYKCKVSNKALPAPIEKTISKAKGQPREPQVYTLPPSRDELTKNQVSLTCLVKGFYPSDIAVWWESLGHVWAVYKTTPPVLDSDGSFFLYSKLTVPKSTWQQGWVFSCSVMHEALHNHYTQKSLSLSPGK

SEQ ID NO: 2195 - protein, 217 aa, synthetic construct
  REGION 1..217: note = Description of Artificial Sequence: Synthetic polypeptide
  REGION 1..217: note = Synthetic Construct
APELLGGPSVFLFPPKPKDTLMISRTPEVTCVVVDVSHEDPEVKFNWYVDGVEVHNAKTKPREEQYNSTYRVVSVLTVLHQDWLNGKEYKCKVSNKALPAPIEKTISKAKGQPREPQVYTLPPSRDELTKNQVSLTCLVKGFYPSDIAVLWESLGHVWAVYKTTPPVLDSDGSFFLYSKLTVPKSTWQQGWVFSCSVMHEALHNHYTQKSLSLSPGK

SEQ ID NO: 2196 - protein, 217 aa, synthetic construct
  REGION 1..217: note = Description of Artificial Sequence: Synthetic polypeptide
  REGION 1..217: note = Synthetic Construct
APELLGGPSVFLFPPKPKDTLMISRTPEVTCVVVDVSHEDPEVKFNWYVDGVEVHNAKTKPREEQYNSTYRVVSVLTVLHQDWLNGKEYKCKVSNKALPAPIEKTISKAKGQPREPQVYTLPPSRDELTKNQVSLTCLVKGFYPSDIAVYWESLGHVWAVYKTTPPVLDSDGSFFLYSKLTVPKSTWQQGWVFSCSVMHEALHNHYTQKSLSLSPGK

SEQ ID NO: 2197 - protein, 217 aa, synthetic construct
  REGION 1..217: note = Description of Artificial Sequence: Synthetic polypeptide
  REGION 1..217: note = Synthetic Construct
APELLGGPSVFLFPPKPKDTLMISRTPEVTCVVVDVSHEDPEVKFNWYVDGVEVHNAKTKPREEQYNSTYRVVSVLTVLHQDWLNGKEYKCKVSNKALPAPIEKTISKAKGQPREPQVYTLPPSRDELTKNQVSLTCLVKGFYPSDIAVEWESLGHVWAVYQTTPPVLDSDGSFFLYSKLTVPKSTWQQGWVFSCSVMHEALHNHYTQKSLSLSPGK

SEQ ID NO: 2198 - protein, 217 aa, synthetic construct
  REGION 1..217: note = Description of Artificial Sequence: Synthetic polypeptide
  REGION 1..217: note = Synthetic Construct
APELLGGPSVFLFPPKPKDTLMISRTPEVTCVVVDVSHEDPEVKFNWYVDGVEVHNAKTKPREEQYNSTYRVVSVLTVLHQDWLNGKEYKCKVSNKALPAPIEKTISKAKGQPREPQVYTLPPSRDELTKNQVSLTCLVKGFYPSDIAVEWESLGHVWAVYFTTPPVLDSDGSFFLYSKLTVPKSTWQQGWVFSCSVMHEALHNHYTQKSLSLSPGK

SEQ ID NO: 2199 - protein, 217 aa, synthetic construct
  REGION 1..217: note = Description of Artificial Sequence: Synthetic polypeptide
  REGION 1..217: note = Synthetic Construct
APELLGGPSVFLFPPKPKDTLMISRTPEVTCVVVDVSHEDPEVKFNWYVDGVEVHNAKTKPREEQYNSTYRVVSVLTVLHQDWLNGKEYKCKVSNKALPAPIEKTISKAKGQPREPQVYTLPPSRDELTKNQVSLTCLVKGFYPSDIAVEWESLGHVWAVYHTTPPVLDSDGSFFLYSKLTVPKSTWQQGWVFSCSVMHEALHNHYTQKSLSLSPGK

SEQ ID NO: 2200 - protein, 217 aa, synthetic construct; identical to SEQ ID NO: 2194
  REGION 1..217: note = Description of Artificial Sequence: Synthetic polypeptide
  REGION 1..217: note = Synthetic Construct

SEQ ID NO: 2201 - protein, 217 aa, synthetic construct; identical to SEQ ID NO: 2197
  REGION 1..217: note = Description of Artificial Sequence: Synthetic polypeptide
  REGION 1..217: note = Synthetic Construct

SEQ ID NO: 2202 - protein, 217 aa, synthetic construct
  REGION 1..217: note = Description of Artificial Sequence: Synthetic polypeptide
  REGION 1..217: note = Synthetic Construct
APELLGGPSVFLFPPKPKDTLMISRTPEVTCVVVDVSHEDPEVKFNWYVDGVEVHNAKTKPREEQYNSTYRVVSVLTVLHQDWLNGKEYKCKVSNKALPAPIEKTISKAKGQPREPQVYTLPPSRDELTKNQVSLTCLVKGFYPSDIAVWWESLGHVWAVYQTTPPVLDSDGSFFLYSKLTVPKSTWQQGWVFSCSVMHEALHNHYTQKSLSLSPGK

SEQ ID NO: 2203 - protein, 217 aa, synthetic construct
  REGION 1..217: note = Description of Artificial Sequence: Synthetic polypeptide
  REGION 1..217: note = Synthetic Construct
APELLGGPSVFLFPPKPKDTLMISRTPEVTCVVVDVSHEDPEVKFNWYVDGVEVHNAKTKPREEQYNSTYRVVSVLTVLHQDWLNGKEYKCKVSNKALPAPIEKTISKAKGQPREPQVYTLPPSRDELTKNQVSLTCLVKGFYPSDIAVWWESLGHVWVNQKTTPPVLDSDGSFFLYSKLTVPKSTWQQGWVFSCSVMHEALHNHYTQKSLSLSPGK

SEQ ID NO: 2204 - protein, 217 aa, synthetic construct
  REGION 1..217: note = Description of Artificial Sequence: Synthetic polypeptide
  REGION 1..217: note = Synthetic Construct
APELLGGPSVFLFPPKPKDTLMISRTPEVTCVVVDVSHEDPEVKFNWYVDGVEVHNAKTKPREEQYNSTYRVVSVLTVLHQDWLNGKEYKCKVSNKALPAPIEKTISKAKGQPREPQVYTLPPSRDELTKNQVSLTCLVKGFYPSDIAVEWESLGHVWVNQQTTPPVLDSDGSFFLYSKLTVPKSTWQQGWVFSCSVMHEALHNHYTQKSLSLSPGK

SEQ ID NO: 2205 - protein, 217 aa, synthetic construct
  REGION 1..217: note = Description of Artificial Sequence: Synthetic polypeptide
  REGION 1..217: note = Synthetic Construct
APELLGGPSVFLFPPKPKDTLMISRTPEVTCVVVDVSHEDPEVKFNWYVDGVEVHNAKTKPREEQYNSTYRVVSVLTVLHQDWLNGKEYKCKVSNKALPAPIEKTISKAKGQPREPQVYTLPPSRDELTKNQVSLTCLVKGFYPSDIAVWWESLGHVWVNQQTTPPVLDSDGSFFLYSKLTVPKSTWQQGWVFSCSVMHEALHNHYTQKSLSLSPGK

SEQ ID NO: 2206 - protein, 217 aa, synthetic construct
  REGION 1..217: note = Description of Artificial Sequence: Synthetic polypeptide
  REGION 1..217: note = Synthetic Construct
APELLGGPSVFLFPPKPKDTLMISRTPEVTCVVVDVSHEDPEVKFNWYVDGVEVHNAKTKPREEQYNSTYRVVSVLTVLHQDWLNGKEYKCKVSNKALPAPIEKTISKAKGQPREPQVYTLPPSRDELTKNQVSLTCLVKGFYPSDIAVWWESYGTEWSSYKTTPPVLDSDGSFFLYSKLTVTKSEWQQGFVFSCSVMHEALHNHYTQKSLSLSPGK

SEQ ID NO: 2207 - protein, 217 aa, synthetic construct
  REGION 1..217: note = Description of Artificial Sequence: Synthetic polypeptide
  REGION 1..217: note = Synthetic Construct
APELLGGPSVFLFPPKPKDTLMISRTPEVTCVVVDVSHEDPEVKFNWYVDGVEVHNAKTKPREEQYNSTYRVVSVLTVLHQDWLNGKEYKCKVSNKALPAPIEKTISKAKGQPREPQVYTLPPSRDELTKNQVSLTCLVKGFYPSDIAVEWESYGTEWSSYQTTPPVLDSDGSFFLYSKLTVTKSEWQQGFVFSCSVMHEALHNHYTQKSLSLSPGK

SEQ ID NO: 2208 - protein, 217 aa, synthetic construct
  REGION 1..217: note = Description of Artificial Sequence: Synthetic polypeptide
  REGION 1..217: note = Synthetic Construct
APELLGGPSVFLFPPKPKDTLMISRTPEVTCVVVDVSHEDPEVKFNWYVDGVEVHNAKTKPREEQYNSTYRVVSVLTVLHQDWLNGKEYKCKVSNKALPAPIEKTISKAKGQPREPQVYTLPPSRDELTKNQVSLTCLVKGFYPSDIAVEWESYGTEWSNYQTTPPVLDSDGSFFLYSKLTVTKSEWQQGFVFSCSVMHEALHNHYTQKSLSLSPGK

SEQ ID NO: 2209 - protein, 217 aa, synthetic construct
  REGION 1..217: note = Description of Artificial Sequence: Synthetic polypeptide
  REGION 1..217: note = Synthetic Construct
APELLGGPSVFLFPPKPKDTLMISRTPEVTCVVVDVSHEDPEVKFNWYVDGVEVHNAKTKPREEQYNSTYRVVSVLTVLHQDWLNGKEYKCKVSNKALPAPIEKTISKAKGQPREPQVYTLPPSRDELTKNQVSLTCLVKGFYPSDIAVLWESYGTEWSSYKTTPPVLDSDGSFFLYSKLTVTKSEWQQGFVFSCSVMHEALHNHYTQKSLSLSPGK

SEQ ID NO: 2210 - protein, 217 aa, synthetic construct
  REGION 1..217: note = Description of Artificial Sequence: Synthetic polypeptide
  REGION 1..217: note = Synthetic Construct
APELLGGPSVFLFPPKPKDTLMISRTPEVTCVVVDVSHEDPEVKFNWYVDGVEVHNAKTKPREEQYNSTYRVVSVLTVLHQDWLNGKEYKCKVSNKALPAPIEKTISKAKGQPREPQVYTLPPSRDELTKNQVSLTCLVKGFYPSDIAVLWESYGTEWSSYRTTPPVLDSDGSFFLYSKLTVTKSEWQQGFVFSCSVMHEALHNHYTQKSLSLSPGK

SEQ ID NO: 2211 - protein, 217 aa, synthetic construct
  REGION 1..217: note = Description of Artificial Sequence: Synthetic polypeptide
  REGION 1..217: note = Synthetic Construct
APELLGGPSVFLFPPKPKDTLMISRTPEVTCVVVDVSHEDPEVKFNWYVDGVEVHNAKTKPREEQYNSTYRVVSVLTVLHQDWLNGKEYKCKVSNKALPAPIEKTISKAKGQPREPQVYTLPPSRDELTKNQVSLTCLVKGFYPSDIAVLWESYGTEWSSYRTTPPVLDSDGSFFLYSKLTVTREEWQQGFVFSCSVMHEALHNHYTQKSLSLSPGK

SEQ ID NO: 2212 - protein, 217 aa, synthetic construct
  REGION 1..217: note = Description of Artificial Sequence: Synthetic polypeptide
  REGION 1..217: note = Synthetic Construct
APELLGGPSVFLFPPKPKDTLMISRTPEVTCVVVDVSHEDPEVKFNWYVDGVEVHNAKTKPREEQYNSTYRVVSVLTVLHQDWLNGKEYKCKVSNKALPAPIEKTISKAKGQPREPQVYTLPPSRDELTKNQVSLTCLVKGFYPSDIAVLWESYGTEWSSYRTTPPVLDSDGSFFLYSKLTVTGEEWQQGFVFSCSVMHEALHNHYTQKSLSLSPGK

SEQ ID NO: 2213 - protein, 217 aa, synthetic construct
  REGION 1..217: note = Description of Artificial Sequence: Synthetic polypeptide
  REGION 1..217: note = Synthetic Construct
APELLGGPSVFLFPPKPKDTLMISRTPEVTCVVVDVSHEDPEVKFNWYVDGVEVHNAKTKPREEQYNSTYRVVSVLTVLHQDWLNGKEYKCKVSNKALPAPIEKTISKAKGQPREPQVYTLPPSRDELTKNQVSLTCLVKGFYPSDIAVLWESYGTEWSSYRTTPPVLDSDGSFFLYSKLTVTREEWQQGFVFSCWVMHEALHNHYTQKSLSLSPGK

SEQ ID NO: 2214 - protein, 217 aa, synthetic construct
  REGION 1..217: note = Description of Artificial Sequence: Synthetic polypeptide
  REGION 1..217: note = Synthetic Construct
APELLGGPSVFLFPPKPKDTLMISRTPEVTCVVVDVSHEDPEVKFNWYVDGVEVHNAKTKPREEQYNSTYRVVSVLTVLHQDWLNGKEYKCKVSNKALPAPIEKTISKAKGQPREPQVYTLPPSRDELTKNQVSLTCLVKGFYPSDIAVLWESYGTEWSSYRTTPPVLDSDGSFFLYSKLTVTKEEWQQGFVFSCWVMHEALHNHYTQKSLSLSPGK

SEQ ID NO: 2215 - protein, 217 aa, synthetic construct
  REGION 1..217: note = Description of Artificial Sequence: Synthetic polypeptide
  REGION 1..217: note = Synthetic Construct
APELLGGPSVFLFPPKPKDTLMISRTPEVTCVVVDVSHEDPEVKFNWYVDGVEVHNAKTKPREEQYNSTYRVVSVLTVLHQDWLNGKEYKCKVSNKALPAPIEKTISKAKGQPREPQVYTLPPSRDELTKNQVSLTCLVKGFYPSDIAVLWESYGTEWSSYRTTPPVLDSDGSFFLYSKLTVTREEWQQGFVFTCWVMHEALHNHYTQKSLSLSPGK

SEQ ID NO: 2216 - protein, 217 aa, synthetic construct
  REGION 1..217: note = Description of Artificial Sequence: Synthetic polypeptide
  REGION 1..217: note = Synthetic Construct
APELLGGPSVFLFPPKPKDTLMISRTPEVTCVVVDVSHEDPEVKFNWYVDGVEVHNAKTKPREEQYNSTYRVVSVLTVLHQDWLNGKEYKCKVSNKALPAPIEKTISKAKGQPREPQVYTLPPSRDELTKNQVSLTCLVKGFYPSDIAVLWESYGTEWSSYRTTPPVLDSDGSFFLYSKLTVTREEWQQGFVFTCGVMHEALHNHYTQKSLSLSPGK

SEQ ID NO: 2217 - protein, 217 aa, synthetic construct
  REGION 1..217: note = Description of Artificial Sequence: Synthetic polypeptide
  REGION 1..217: note = Synthetic Construct
APELLGGPSVFLFPPKPKDTLMISRTPEVTCVVVDVSHEDPEVKFNWYVDGVEVHNAKTKPREEQYNSTYRVVSVLTVLHQDWLNGKEYKCKVSNKALPAPIEKTISKAKGQPREPQVYTLPPSRDELTKNQVSLTCLVKGFYPSDIAVLWESYGTEWSSYRTTPPVLDSDGSFFLYSKLTVTREEWQQGFVFECWVMHEALHNHYTQKSLSLSPGK

SEQ ID NO: 2218 - protein, 217 aa, synthetic construct
  REGION 1..217: note = Description of Artificial Sequence: Synthetic polypeptide
  REGION 1..217: note = Synthetic Construct
APELLGGPSVFLFPPKPKDTLMISRTPEVTCVVVDVSHEDPEVKFNWYVDGVEVHNAKTKPREEQYNSTYRVVSVLTVLHQDWLNGKEYKCKVSNKALPAPIEKTISKAKGQPREPQVYTLPPSRDELTKNQVSLTCLVKGFYPSDIAVLWESYGTEWSSYRTTPPVLDSDGSFFLYSKLTVTREEWQQGFVFKCWVMHEALHNHYTQKSLSLSPGK

SEQ ID NO: 2219 - protein, 217 aa, synthetic construct
  REGION 1..217: note = Description of Artificial Sequence: Synthetic polypeptide
  REGION 1..217: note = Synthetic Construct
APELLGGPSVFLFPPKPKDTLMISRTPEVTCVVVDVSHEDPEVKFNWYVDGVEVHNAKTKPREEQYNSTYRVVSVLTVLHQDWLNGKEYKCKVSNKALPAPIEKTISKAKGQPREPQVYTLPPSRDELTKNQVSLTCLVKGFYPSDIAVLWESYGTEWSSYRTTPPVLDSDGSFFLYSKLTVTPEEWQQGFVFKCWVMHEALHNHYTQKSLSLSPGK

SEQ ID NO: 2220 - protein, 217 aa, synthetic construct
  REGION 1..217: note = Description of Artificial Sequence: Synthetic polypeptide
  REGION 1..217: note = Synthetic Construct
APELLGGPSVFLFPPKPKDTLMISRTPEVTCVVVDVSHEDPEVKFNWYVDGVEVHNAKTKPREEQYNSTYRVVSVLTVLHQDWLNGKEYKCKVSNKALPAPIEKTISKAKGQPREPQVYTLPPSRDELTKNQVSLTCLVKGFYPSDIAVWWESYGTEWSSYRTTPPVLDSDGSFFLYSKLTVTREEWQQGFVFSCSVMHEALHNHYTQKSLSLSPGK

SEQ ID NO: 2221 - protein, 217 aa, synthetic construct
  REGION 1..217: note = Description of Artificial Sequence: Synthetic polypeptide
  REGION 1..217: note = Synthetic Construct
APELLGGPSVFLFPPKPKDTLMISRTPEVTCVVVDVSHEDPEVKFNWYVDGVEVHNAKTKPREEQYNSTYRVVSVLTVLHQDWLNGKEYKCKVSNKALPAPIEKTISKAKGQPREPQVYTLPPSRDELTKNQVSLTCLVKGFYPSDIAVWWESYGTEWSSYRTTPPVLDSDGSFFLYSKLTVTGEEWQQGFVFSCSVMHEALHNHYTQKSLSLSPGK

SEQ ID NO: 2222 - protein, 217 aa, synthetic construct
  REGION 1..217: note = Description of Artificial Sequence: Synthetic polypeptide
  REGION 1..217: note = Synthetic Construct
APELLGGPSVFLFPPKPKDTLMISRTPEVTCVVVDVSHEDPEVKFNWYVDGVEVHNAKTKPREEQYNSTYRVVSVLTVLHQDWLNGKEYKCKVSNKALPAPIEKTISKAKGQPREPQVYTLPPSRDELTKNQVSLTCLVKGFYPSDIAVWWESYGTEWSSYRTTPPVLDSDGSFFLYSKLTVTREEWQQGFVFTCWVMHEALHNHYTQKSLSLSPGK

SEQ ID NO: 2223 - protein, 217 aa, synthetic construct
  REGION 1..217: note = Description of Artificial Sequence: Synthetic polypeptide
  REGION 1..217: note = Synthetic Construct
APELLGGPSVFLFPPKPKDTLMISRTPEVTCVVVDVSHEDPEVKFNWYVDGVEVHNAKTKPREEQYNSTYRVVSVLTVLHQDWLNGKEYKCKVSNKALPAPIEKTISKAKGQPREPQVYTLPPSRDELTKNQVSLTCLVKGFYPSDIAVWWESYGTEWSSYRTTPPVLDSDGSFFLYSKLTVTGEEWQQGFVFTCWVMHEALHNHYTQKSLSLSPGK

SEQ ID NO: 2224 - protein, 217 aa, synthetic construct
  REGION 1..217: note = Description of Artificial Sequence: Synthetic polypeptide
  REGION 1..217: note = Synthetic Construct
APELLGGPSVFLFPPKPKDTLMISRTPEVTCVVVDVSHEDPEVKFNWYVDGVEVHNAKTKPREEQYNSTYRVVSVLTVLHQDWLNGKEYKCKVSNKALPAPIEKTISKAKGQPREPQVYTLPPSRDELTKNQVSLTCLVKGFYPSDIAVWWESYGTEWSSYRTTPPVLDSDGSFFLYSKLTVTREEWQQGFVFTCGVMHEALHNHYTQKSLSLSPGK

SEQ ID NO: 2225 - protein, 217 aa, synthetic construct
  REGION 1..217: note = Description of Artificial Sequence: Synthetic polypeptide
  REGION 1..217: note = Synthetic Construct
APELLGGPSVFLFPPKPKDTLMISRTPEVTCVVVDVSHEDPEVKFNWYVDGVEVHNAKTKPREEQYNSTYRVVSVLTVLHQDWLNGKEYKCKVSNKALPAPIEKTISKAKGQPREPQVYTLPPSRDELTKNQVSLTCLVKGFYPSDIAVLWESYGTEWSSYRTTPPVLDSDGSFFLYSKLTVTKEEWQQGFVFSCSVMHEALHNHYTQKSLSLSPGK

SEQ ID NO: 2226 - protein, 217 aa, synthetic construct
  REGION 1..217: note = Description of Artificial Sequence: Synthetic polypeptide
  REGION 1..217: note = Synthetic Construct
APELLGGPSVFLFPPKPKDTLMISRTPEVTCVVVDVSHEDPEVKFNWYVDGVEVHNAKTKPREEQYNSTYRVVSVLTVLHQDWLNGKEYKCKVSNKALPAPIEKTISKAKGQPRFDYVTTLPPSRDELTKNQVSLTCLVKGFYPSDIAVEWESNGQPENNYKTTPPVLDSDGSFFLYSKLTVDKSRWQQGNVFSCSVMHEALHNHYGFHDLSLSPGK

SEQ ID NO: 2227 - protein, 217 aa, synthetic construct
  REGION 1..217: note = Description of Artificial Sequence: Synthetic polypeptide
  REGION 1..217: note = Synthetic Construct
APELLGGPSVFLFPPKPKDTLMISRTPEVTCVVVDVSHEDPEVKFNWYVDGVEVHNAKTKPREEQYNSTYRVVSVLTVLHQDWLNGKEYKCKVSNKALPAPIEKTISKAKGQPRFDMVTTLPPSRDELTKNQVSLTCLVKGFYPSDIAVEWESNGQPENNYKTTPPVLDSDGSFFLYSKLTVDKSRWQQGNVFSCSVMHEALHNHYGFHDLSLSPGK

SEQ ID NO: 2228 - protein, 217 aa, synthetic construct
  REGION 1..217: note = Description of Artificial Sequence: Synthetic polypeptide
  REGION 1..217: note = Synthetic Construct
APELLGGPSVFLFPPKPKDTLMISRTPEVTCVVVDVSHEDPEVKFNWYVDGVEVHNAKTKPREEQYNSTYRVVSVLTVLHQDWLNGKEYKCKVSNKALPAPIEKTISKAKGQPRFEYVTTLPPSRDELTKNQVSLTCLVKGFYPSDIAVEWESNGQPENNYKTTPPVLDSDGSFFLYSKLTVDKSRWQQGNVFSCSVMHEALHNHYGFHDLSLSPGK

SEQ ID NO: 2229 - protein, 217 aa, synthetic construct
  REGION 1..217: note = Description of Artificial Sequence: Synthetic polypeptide
  REGION 1..217: note = Synthetic Construct
APELLGGPSVFLFPPKPKDTLMISRTPEVTCVVVDVSHEDPEVKFNWYVDGVEVHNAKTKPREEQYNSTYRVVSVLTVLHQDWLNGKEYKCKVSNKALPAPIEKTISKAKGQPRFEMVTTLPPSRDELTKNQVSLTCLVKGFYPSDIAVEWESNGQPENNYKTTPPVLDSDGSFFLYSKLTVDKSRWQQGNVFSCSVMHEALHNHYGFHDLSLSPGK

SEQ ID NO: 2230 - protein, 217 aa, synthetic construct
  REGION 1..217: note = Description of Artificial Sequence: Synthetic polypeptide
  REGION 1..217: note = Synthetic Construct
APELLGGPSVFLFPPKPKDTLMISRTPEVTCVVVDVSHEDPEVKFNWYVDGVEVHNAKTKPREEQYNSTYRVVSVLTVLHQDWLNGKEYKCKVSNKALPAPIEKTISKAKGQPRFELVTTLPPSRDELTKNQVSLTCLVKGFYPSDIAVEWESNGQPENNYKTTPPVLDSDGSFFLYSKLTVDKSRWQQGNVFSCSVMHEALHNHYGFHDLSLSPGK

SEQ ID NO: 2231 - protein, 217 aa, synthetic construct
  REGION 1..217: note = Description of Artificial Sequence: Synthetic polypeptide
  REGION 1..217: note = Synthetic Construct
APELLGGPSVFLFPPKPKDTLMISRTPEVTCVVVDVSHEDPEVEFIWYVDGVDVRYEWQLPREEQYNSTYRVVSVLTVLHQDWLNGKEYKCKVSNKALPAPIEKTISKAKGQPREPQVYTLPPSRDELTKNQVSLTCLVKGFYPSDIAVEWESNGQPENNYKTTPPVLDSDGSFFLYSKLTVDKSRWQQGNVFSCSVMHEALHNHYTQKSLSLSPGK

SEQ ID NO: 2232 - protein, 217 aa, synthetic construct
  REGION 1..217: note = Description of Artificial Sequence: Synthetic polypeptide
  REGION 1..217: note = Synthetic Construct
APELLGGPSVFLFPPKPKDTLMISRTPEVTCVVVDVSHEDPEVGFVWYVDGVPVSWEWYWPREEQYNSTYRVVSVLTVLHQDWLNGKEYKCKVSNKALPAPIEKTISKAKGQPREPQVYTLPPSRDELTKNQVSLTCLVKGFYPSDIAVEWESNGQPENNYKTTPPVLDSDGSFFLYSKLTVDKSRWQQGNVFSCSVMHEALHNHYTQKSLSLSPGK

SEQ ID NO: 2233 - protein, 217 aa, synthetic construct
  REGION 1..217: note = Description of Artificial Sequence: Synthetic polypeptide
  REGION 1..217: note = Synthetic Construct
APELLGGPSVFLFPPKPKDTLMISRTPEVTCVVVDVSHEDPEVQFDWYVDGVMVRREWHRPREEQYNSTYRVVSVLTVLHQDWLNGKEYKCKVSNKALPAPIEKTISKAKGQPREPQVYTLPPSRDELTKNQVSLTCLVKGFYPSDIAVEWESNGQPENNYKTTPPVLDSDGSFFLYSKLTVDKSRWQQGNVFSCSVMHEALHNHYTQKSLSLSPGK

SEQ ID NO: 2234 - protein, 217 aa, synthetic construct
  REGION 1..217: note = Description of Artificial Sequence: Synthetic polypeptide
  REGION 1..217: note = Synthetic Construct
APELLGGPSVFLFPPKPKDTLMISRTPEVTCVVVDVSHEDPEVSFEWYVDGVPVRWEWQWPREEQYNSTYRVVSVLTVLHQDWLNGKEYKCKVSNKALPAPIEKTISKAKGQPREPQVYTLPPSRDELTKNQVSLTCLVKGFYPSDIAVEWESNGQPENNYKTTPPVLDSDGSFFLYSKLTVDKSRWQQGNVFSCSVMHEALHNHYTQKSLSLSPGK

SEQ ID NO: 2235 - protein, 217 aa, synthetic construct
  REGION 1..217: note = Description of Artificial Sequence: Synthetic polypeptide
  REGION 1..217: note = Synthetic Construct
APELLGGPSVFLFPPKPKDTLMISRTPEVTCVVVDVSHEDPEVAFTWYVDGVPVRWEWQNPREEQYNSTYRVVSVLTVLHQDWLNGKEYKCKVSNKALPAPIEKTISKAKGQPREPQVYTLPPSRDELTKNQVSLTCLVKGFYPSDIAVEWESNGQPENNYKTTPPVLDSDGSFFLYSKLTVDKSRWQQGNVFSCSVMHEALHNHYTQKSLSLSPGK

SEQ ID NO: 2236 - protein, 217 aa, synthetic construct
  REGION 1..217: note = Description of Artificial Sequence: Synthetic polypeptide
  REGION 1..217: note = Synthetic Construct
APELLGGPSVFLFPPKPKDTLMISRTPEVTCVVVDPQTPPWEVKFNWYVDGVEVHNAKTKPREEEYYTYYRVVSVLTVLHQDWLNGKEYKCKVSNKALPAPIEKTISKAKGQPREPQVYTLPPSRDELTKNQVSLTCLVKGFYPSDIAVEWESNGQPENNYKTTPPVLDSDGSFFLYSKLTVDKSRWQQGNVFSCSVMHEALHNHYTQKSLSLSPGK

SEQ ID NO: 2237 - protein, 217 aa, synthetic construct
  REGION 1..217: note = Description of Artificial Sequence: Synthetic polypeptide
  REGION 1..217: note = Synthetic Construct
APELLGGPSVFLFPPKPKDTLMISRTPEVTCVVVDPPSPPWEVKFNWYVDGVEVHNAKTKPREEEYYSNYRVVSVLTVLHQDWLNGKEYKCKVSNKALPAPIEKTISKAKGQPREPQVYTLPPSRDELTKNQVSLTCLVKGFYPSDIAVEWESNGQPENNYKTTPPVLDSDGSFFLYSKLTVDKSRWQQGNVFSCSVMHEALHNHYTQKSLSLSPGK

SEQ ID NO: 2238 - protein, 217 aa, synthetic construct
  REGION 1..217: note = Description of Artificial Sequence: Synthetic polypeptide
  REGION 1..217: note = Synthetic Construct
APELLGGPSVFLFPPKPKDTLMISRTPEVTCVVVDPQTPPWEVKFNWYVDGVEVHNAKTKPREEEYYSNYRVVSVLTVLHQDWLNGKEYKCKVSNKALPAPIEKTISKAKGQPREPQVYTLPPSRDELTKNQVSLTCLVKGFYPSDIAVEWESNGQPENNYKTTPPVLDSDGSFFLYSKLTVDKSRWQQGNVFSCSVMHEALHNHYTQKSLSLSPGK

SEQ ID NO: 2239 - protein, 217 aa, synthetic construct
  REGION 1..217: note = Description of Artificial Sequence: Synthetic polypeptide
  REGION 1..217: note = Synthetic Construct
APELLGGPSVFLFPPKPKDTLMISRTPEVTCVVVDFRGPPWEVKFNWYVDGVEVHNAKTKPREEEYYHDYRVVSVLTVLHQDWLNGKEYKCKVSNKALPAPIEKTISKAKGQPREPQVYTLPPSRDELTKNQVSLTCLVKGFYPSDIAVEWESNGQPENNYKTTPPVLDSDGSFFLYSKLTVDKSRWQQGNVFSCSVMHEALHNHYTQKSLSLSPGK

SEQ ID NO: 2240 - protein, 217 aa, synthetic construct
  REGION 1..217: note = Description of Artificial Sequence: Synthetic polypeptide
  REGION 1..217: note = Synthetic Construct
APELLGGPSVFLFPPKPKDTLMISRTPEVTCVVVDPQTVPWEVKFNWYVDGVEVHNAKTKPREEEYYSNYRVVSVLTVLHQDWLNGKEYKCKVSNKALPAPIEKTISKAKGQPREPQVYTLPPSRDELTKNQVSLTCLVKGFYPSDIAVEWESNGQPENNYKTTPPVLDSDGSFFLYSKLTVDKSRWQQGNVFSCSVMHEALHNHYTQKSLSLSPGK

SEQ ID NO: 2241 - protein, 217 aa, synthetic construct
  REGION 1..217: note = Description of Artificial Sequence: Synthetic polypeptide
  REGION 1..217: note = Synthetic Construct
APELLGGPSVFLFPPKPKDTLMISRTPEVTCVVVDVSVPPRMVKFNWYVDGVEVHNAKTKSLTSQHNSTVRVVSVLTVLHQDWLNGKEYKCKVSNKALPAPIEKTISKAKGQPREPQVYTLPPSRDELTKNQVSLTCLVKGFYPSDIAVEWESNGQPENNYKTTPPVLDSDGSFFLYSKLTVDKSRWQQGNVFSCSVMHEALHNHYTQKSLSLSPGK

SEQ ID NO: 2242 - protein, 217 aa, synthetic construct
  REGION 1..217: note = Description of Artificial Sequence: Synthetic polypeptide
  REGION 1..217: note = Synthetic Construct
APELLGGPSVFLFPPKPKDTLMISRTPEVTCVVVDVSVPPWMVKFNWYVDGVEVHNAKTKSLTSQHNSTVRVVSVLTVLHQDWLNGKEYKCKVSNKALPAPIEKTISKAKGQPREPQVYTLPPSRDELTKNQVSLTCLVKGFYPSDIAVEWESNGQPENNYKTTPPVLDSDGSFFLYSKLTVDKSRWQQGNVFSCSVMHEALHNHYTQKSLSLSPGK

SEQ ID NO: 2243 - protein, 217 aa, synthetic construct
  REGION 1..217: note = Description of Artificial Sequence: Synthetic polypeptide
  REGION 1..217: note = Synthetic Construct
APELLGGPSVFLFPPKPKDTLMISRTPEVTCVVVDVSDMWEYVKFNWYVDGVEVHNAKTKPWVKQLNSTWRVVSVLTVLHQDWLNGKEYKCKVSNKALPAPIEKTISKAKGQPREPQVYTLPPSRDELTKNQVSLTCLVKGFYPSDIAVEWESNGQPENNYKTTPPVLDSDGSFFLYSKLTVDKSRWQQGNVFSCSVMHEALHNHYTQKSLSLSPGK

SEQ ID NO: 2244 - protein, 217 aa, synthetic construct
  REGION 1..217: note = Description of Artificial Sequence: Synthetic polypeptide
  REGION 1..217: note = Synthetic Construct
APELLGGPSVFLFPPKPKDTLMISRTPEVTCVVVDVSDDWTWVKFNWYVDGVEVHNAKTKPWIAQPNSTWRVVSVLTVLHQDWLNGKEYKCKVSNKALPAPIEKTISKAKGQPREPQVYTLPPSRDELTKNQVSLTCLVKGFYPSDIAVEWESNGQPENNYKTTPPVLDSDGSFFLYSKLTVDKSRWQQGNVFSCSVMHEALHNHYTQKSLSLSPGK

SEQ ID NO: 2245 - protein, 217 aa, synthetic construct
  REGION 1..217: note = Description of Artificial Sequence: Synthetic polypeptide
  REGION 1..217: note = Synthetic Construct
APELLGGPSVFLFPPKPKDTLMISRTPEVTCVVVDVSDDWEWVKFNWYVDGVEVHNAKTKPWKLQLNSTWRVVSVLTVLHQDWLNGKEYKCKVSNKALPAPIEKTISKAKGQPREPQVYTLPPSRDELTKNQVSLTCLVKGFYPSDIAVEWESNGQPENNYKTTPPVLDSDGSFFLYSKLTVDKSRWQQGNVFSCSVMHEALHNHYTQKSLSLSPGK

SEQ ID NO: 2246 - protein, 217 aa, synthetic construct
  REGION 1..217: note = Description of Artificial Sequence: Synthetic polypeptide
  REGION 1..217: note = Synthetic Construct
APELLGGPSVFLFPPKPKDTLMISRTPEVTCVVVDVSHEDPWVWFYWYVDGVEVHNAKTKPREEQYNSTYRVVSVLTVLHQDWLNGKEYKCSVVNIALWWSIEKTISKAKGQPREPQVYTLPPSRDELTKNQVSLTCLVKGFYPSDIAVEWESNGQPENNYKTTPPVLDSDGSFFLYSKLTVDKSRWQQGNVFSCSVMHEALHNHYTQKSLSLSPGK

SEQ ID NO: 2247 - protein, 217 aa, synthetic construct
  REGION 1..217: note = Description of Artificial Sequence: Synthetic polypeptide
  REGION 1..217: note = Synthetic Construct
APELLGGPSVFLFPPKPKDTLMISRTPEVTCVVVDVSHEDPVVGFRWYVDGVEVHNAKTKPREEQYNSTYRVVSVLTVLHQDWLNGKEYKCRVSNSALTWKIEKTISKAKGQPREPQVYTLPPSRDELTKNQVSLTCLVKGFYPSDIAVEWESNGQPENNYKTTPPVLDSDGSFFLYSKLTVDKSRWQQGNVFSCSVMHEALHNHYTQKSLSLSPGK

SEQ ID NO: 2248 - protein, 217 aa, synthetic construct
  REGION 1..217: note = Description of Artificial Sequence: Synthetic polypeptide
  REGION 1..217: note = Synthetic Construct
APELLGGPSVFLFPPKPKDTLMISRTPEVTCVVVDVSHEDPVVGFRWYVDGVEVHNAKTKPREEQYNSTYRVVSVLTVLHQDWLNGKEYKCRVSNSALSWRIEKTISKAKGQPREPQVYTLPPSRDELTKNQVSLTCLVKGFYPSDIAVEWESNGQPENNYKTTPPVLDSDGSFFLYSKLTVDKSRWQQGNVFSCSVMHEALHNHYTQKSLSLSPGK

SEQ ID NO: 2249 - protein, 217 aa, synthetic construct
  REGION 1..217: note = Description of Artificial Sequence: Synthetic polypeptide
  REGION 1..217: note = Synthetic Construct
APELLGGPSVFLFPPKPKDTLMISRTPEVTCVVVDVSHEDPIVGFRWYVDGVEVHNAKTKPREEQYNSTYRVVSVLTVLHQDWLNGKEYKCRVSNSALRWRIEKTISKAKGQPREPQVYTLPPSRDELTKNQVSLTCLVKGFYPSDIAVEWESNGQPENNYKTTPPVLDSDGSFFLYSKLTVDKSRWQQGNVFSCSVMHEALHNHYTQKSLSLSPGK

SEQ ID NO: 2250 - protein, 217 aa, synthetic construct
  REGION 1..217: note = Description of Artificial Sequence: Synthetic polypeptide
  REGION 1..217: note = Synthetic Construct
APELLGGPSVFLFPPKPKDTLMISRTPEVTCVVVDVSHEDPAVGFEWYVDGVEVHNAKTKPREEQYNSTYRVVSVLTVLHQDWLNGKEYKCQVFNWALDWVIEKTISKAKGQPREPQVYTLPPSRDELTKNQVSLTCLVKGFYPSDIAVEWESNGQPENNYKTTPPVLDSDGSFFLYSKLTVDKSRWQQGNVFSCSVMHEALHNHYTQKSLSLSPGK

SEQ ID NO: 2251 - protein, 217 aa, synthetic construct
  REGION 1..217: note = Description of Artificial Sequence: Synthetic polypeptide
  REGION 1..217: note = Synthetic Construct
APELLGGPSVFLFPPKPKDTLMISRTPEVTCVVVDVSHEDPEVKFNWYVDGVEVHNAKTKPREEQYNSTYRVVSVLTVLHQDWLNGKEYKCKVSNKALPAPIEKTISKAKGQPREPQVYTLPPSRDELTKNQVSLSCAVKGFYPSDIAVEWESNGQPENNYKTTPPVLDSDGSFFLVSKLTVDKSRWQQGNVFSCSVMHEALHNHYTQKSLSLSPGK

SEQ ID NO: 2252 - protein, 217 aa, synthetic construct
  REGION 1..217: note = Description of Artificial Sequence: Synthetic polypeptide
  REGION 1..217: note = Synthetic Construct
APEAAGGPSVFLFPPKPKDTLMISRTPEVTCVVVDVSHEDPEVKFNWYVDGVEVHNAKTKPREEQYNSTYRVVSVLTVLHQDWLNGKEYKCKVSNKALPAPIEKTISKAKGQPREPQVYTLPPSRDELTKNQVSLSCAVKGFYPSDIAVEWESNGQPENNYKTTPPVLDSDGSFFLVSKLTVDKSRWQQGNVFSCSVMHEALHNHYTQKSLSLSPGK

SEQ ID NO: 2253 - protein, 217 aa, synthetic construct
  REGION 1..217: note = Description of Artificial Sequence: Synthetic polypeptide
  REGION 1..217: note = Synthetic Construct
APELLGGPSVFLFPPKPKDTLYITREPEVTCVVVDVSHEDPEVKFNWYVDGVEVHNAKTKPREEQYNSTYRVVSVLTVLHQDWLNGKEYKCKVSNKALPAPIEKTISKAKGQPREPQVYTLPPSRDELTKNQVSLSCAVKGFYPSDIAVEWESNGQPENNYKTTPPVLDSDGSFFLVSKLTVDKSRWQQGNVFSCSVMHEALHNHYTQKSLSLSPGK

SEQ ID NO: 2254 - protein, 217 aa, synthetic construct
  REGION 1..217: note = Description of Artificial Sequence: Synthetic polypeptide
  REGION 1..217: note = Synthetic Construct
APEAAGGPSVFLFPPKPKDTLYITREPEVTCVVVDVSHEDPEVKFNWYVDGVEVHNAKTKPREEQYNSTYRVVSVLTVLHQDWLNGKEYKCKVSNKALPAPIEKTISKAKGQPREPQVYTLPPSRDELTKNQVSLSCAVKGFYPSDIAVEWESNGQPENNYKTTPPVLDSDGSFFLVSKLTVDKSRWQQGNVFSCSVMHEALHNHYTQKSLSLSPGK

SEQ ID NO: 2255 - protein, 217 aa, synthetic construct
  REGION 1..217: note = Description of Artificial Sequence: Synthetic polypeptide
  REGION 1..217: note = Synthetic Construct
APELLGGPSVFLFPPKPKDTLMISRTPEVTCVVVDVSHEDPEVKFNWYVDGVEVHNAKTKPREEQYNSTYRVVSVLTVLHQDWLNGKEYKCKVSNKALPAPIEKTISKAKGQPREPQVYTLPPSRDELTKNQVSLWCLVKGFYPSDIAVEWESNGQPENNYKTTPPVLDSDGSFFLYSKLTVDKSRWQQGNVFSCSVMHEALHNHYTQKSLSLSPGK

SEQ ID NO: 2256 - protein, 217 aa, synthetic construct
  REGION 1..217: note = Description of Artificial Sequence: Synthetic polypeptide
  REGION 1..217: note = Synthetic Construct
APEAAGGPSVFLFPPKPKDTLMISRTPEVTCVVVDVSHEDPEVKFNWYVDGVEVHNAKTKPREEQYNSTYRVVSVLTVLHQDWLNGKEYKCKVSNKALPAPIEKTISKAKGQPREPQVYTLPPSRDELTKNQVSLWCLVKGFYPSDIAVEWESNGQPENNYKTTPPVLDSDGSFFLYSKLTVDKSRWQQGNVFSCSVMHEALHNHYTQKSLSLSPGK

SEQ ID NO: 2257 - protein, 217 aa, synthetic construct
  REGION 1..217: note = Description of Artificial Sequence: Synthetic polypeptide
  REGION 1..217: note = Synthetic Construct
APELLGGPSVFLFPPKPKDTLYITREPEVTCVVVDVSHEDPEVKFNWYVDGVEVHNAKTKPREEQYNSTYRVVSVLTVLHQDWLNGKEYKCKVSNKALPAPIEKTISKAKGQPREPQVYTLPPSRDELTKNQVSLWCLVKGFYPSDIAVEWESNGQPENNYKTTPPVLDSDGSFFLYSKLTVDKSRWQQGNVFSCSVMHEALHNHYTQKSLSLSPGK

SEQ ID NO: 2258 - protein, 217 aa, synthetic construct
  REGION 1..217: note = Description of Artificial Sequence: Synthetic polypeptide
  REGION 1..217: note = Synthetic Construct
APEAAGGPSVFLFPPKPKDTLYITREPEVTCVVVDVSHEDPEVKFNWYVDGVEVHNAKTKPREEQYNSTYRVVSVLTVLHQDWLNGKEYKCKVSNKALPAPIEKTISKAKGQPREPQVYTLPPSRDELTKNQVSLWCLVKGFYPSDIAVEWESNGQPENNYKTTPPVLDSDGSFFLYSKLTVDKSRWQQGNVFSCSVMHEALHNHYTQKSLSLSPGK

SEQ ID NO: 2259 - protein, 217 aa, synthetic construct
  REGION 1..217: note = Description of Artificial Sequence: Synthetic polypeptide
  REGION 1..217: note = Synthetic Construct
APELLGGPSVFLFPPKPKDTLMISRTPEVTCVVVDVSHEDPEVKFNWYVDGVEVHNAKTKPREEQYNSTYRVVSVLTVLHQDWLNGKEYKCKVSNKALPAPIEKTISKAKGQPREPQVYTLPPSRDELTKNQVSLWCLVKGFYPSDIAVWWESYGTEWSSYKTTPPVLDSDGSFFLYSKLTVTKEEWQQGFVFSCSVMHEALHNHYTQKSLSLSPGK

SEQ ID NO: 2260 - protein, 217 aa, synthetic construct
  REGION 1..217: note = Description of Artificial Sequence: Synthetic polypeptide
  REGION 1..217: note = Synthetic Construct
APEAAGGPSVFLFPPKPKDTLMISRTPEVTCVVVDVSHEDPEVKFNWYVDGVEVHNAKTKPREEQYNSTYRVVSVLTVLHQDWLNGKEYKCKVSNKALPAPIEKTISKAKGQPREPQVYTLPPSRDELTKNQVSLWCLVKGFYPSDIAVWWESYGTEWSSYKTTPPVLDSDGSFFLYSKLTVTKEEWQQGFVFSCSVMHEALHNHYTQKSLSLSPGK

SEQ ID NO: 2261 - protein, 217 aa, synthetic construct
  REGION 1..217: note = Description of Artificial Sequence: Synthetic polypeptide
  REGION 1..217: note = Synthetic Construct
APELLGGPSVFLFPPKPKDTLYITREPEVTCVVVDVSHEDPEVKFNWYVDGVEVHNAKTKPREEQYNSTYRVVSVLTVLHQDWLNGKEYKCKVSNKALPAPIEKTISKAKGQPREPQVYTLPPSRDELTKNQVSLWCLVKGFYPSDIAVWWESYGTEWSSYKTTPPVLDSDGSFFLYSKLTVTKEEWQQGFVFSCSVMHEALHNHYTQKSLSLSPGK

SEQ ID NO: 2262 - protein, 217 aa, synthetic construct
  REGION 1..217: note = Description of Artificial Sequence: Synthetic polypeptide
  REGION 1..217: note = Synthetic Construct
APEAAGGPSVFLFPPKPKDTLYITREPEVTCVVVDVSHEDPEVKFNWYVDGVEVHNAKTKPREEQYNSTYRVVSVLTVLHQDWLNGKEYKCKVSNKALPAPIEKTISKAKGQPREPQVYTLPPSRDELTKNQVSLWCLVKGFYPSDIAVWWESYGTEWSSYKTTPPVLDSDGSFFLYSKLTVTKEEWQQGFVFSCSVMHEALHNHYTQKSLSLSPGK

SEQ ID NO: 2263 - protein, 217 aa, synthetic construct
  REGION 1..217: note = Description of Artificial Sequence: Synthetic polypeptide
  REGION 1..217: note = Synthetic Construct
APELLGGPSVFLFPPKPKDTLMISRTPEVTCVVVDVSHEDPEVKFNWYVDGVEVHNAKTKPREEQYNSTYRVVSVLTVLHQDWLNGKEYKCKVSNKALPAPIEKTISKAKGQPREPQVYTLPPSRDELTKNQVSLSCAVKGFYPSDIAVWWESYGTEWSSYKTTPPVLDSDGSFFLVSKLTVTKEEWQQGFVFSCSVMHEALHNHYTQKSLSLSPGK

SEQ ID NO: 2264 - protein, 217 aa, synthetic construct
  REGION 1..217: note = Description of Artificial Sequence: Synthetic polypeptide
  REGION 1..217: note = Synthetic Construct
APEAAGGPSVFLFPPKPKDTLMISRTPEVTCVVVDVSHEDPEVKFNWYVDGVEVHNAKTKPREEQYNSTYRVVSVLTVLHQDWLNGKEYKCKVSNKALPAPIEKTISKAKGQPREPQVYTLPPSRDELTKNQVSLSCAVKGFYPSDIAVWWESYGTEWSSYKTTPPVLDSDGSFFLVSKLTVTKEEWQQGFVFSCSVMHEALHNHYTQKSLSLSPGK

SEQ ID NO: 2265 - protein, 217 aa, synthetic construct
  REGION 1..217: note = Description of Artificial Sequence: Synthetic polypeptide
  REGION 1..217: note = Synthetic Construct
APELLGGPSVFLFPPKPKDTLYITREPEVTCVVVDVSHEDPEVKFNWYVDGVEVHNAKTKPREEQYNSTYRVVSVLTVLHQDWLNGKEYKCKVSNKALPAPIEKTISKAKGQPREPQVYTLPPSRDELTKNQVSLSCAVKGFYPSDIAVWWESYGTEWSSYKTTPPVLDSDGSFFLVSKLTVTKEEWQQGFVFSCSVMHEALHNHYTQKSLSLSPGK

SEQ ID NO: 2266 - protein, 217 aa, synthetic construct
  REGION 1..217: note = Description of Artificial Sequence: Synthetic polypeptide
  REGION 1..217: note = Synthetic Construct
APEAAGGPSVFLFPPKPKDTLYITREPEVTCVVVDVSHEDPEVKFNWYVDGVEVHNAKTKPREEQYNSTYRVVSVLTVLHQDWLNGKEYKCKVSNKALPAPIEKTISKAKGQPREPQVYTLPPSRDELTKNQVSLSCAVKGFYPSDIAVWWESYGTEWSSYKTTPPVLDSDGSFFLVSKLTVTKEEWQQGFVFSCSVMHEALHNHYTQKSLSLSPGK

SEQ ID NO: 2267 - protein, 217 aa, synthetic construct
  REGION 1..217: note = Description of Artificial Sequence: Synthetic polypeptide
  REGION 1..217: note = Synthetic Construct
APELLGGPSVFLFPPKPKDTLMISRTPEVTCVVVDVSHEDPEVKFNWYVDGVEVHNAKTKPREEQYNSTYRVVSVLTVLHQDWLNGKEYKCKVSNKALPAPIEKTISKAKGQPREPQVYTLPPSRDELTKNQVSLWCLVKGFYPSDIAVEWESFGTEWSSYKTTPPVLDSDGSFFLYSKLTVTKEEWQQGFVFSCSVMHEALHNHYTQKSLSLSPGK

SEQ ID NO: 2268 - protein, 217 aa, synthetic construct
  REGION 1..217: note = Description of Artificial Sequence: Synthetic polypeptide
  REGION 1..217: note = Synthetic Construct
APEAAGGPSVFLFPPKPKDTLMISRTPEVTCVVVDVSHEDPEVKFNWYVDGVEVHNAKTKPREEQYNSTYRVVSVLTVLHQDWLNGKEYKCKVSNKALPAPIEKTISKAKGQPREPQVYTLPPSRDELTKNQVSLWCLVKGFYPSDIAVEWESFGTEWSSYKTTPPVLDSDGSFFLYSKLTVTKEEWQQGFVFSCSVMHEALHNHYTQKSLSLSPGK

SEQ ID NO: 2269 - protein, 217 aa, synthetic construct
  REGION 1..217: note = Description of Artificial Sequence: Synthetic polypeptide
  REGION 1..217: note = Synthetic Construct
APEAAGGPSVFLFPPKPKDTLMISRTPEVTCVVVDVSHEDPEVKFNWYVDGVEVHNAKTKPREEQYNSTYRVVSVLTVLHQDWLNGKEYKCKVSNKALGAPIEKTISKAKGQPREPQVYTLPPSRDELTKNQVSLWCLVKGFYPSDIAVEWESFGTEWSSYKTTPPVLDSDGSFFLYSKLTVTKEEWQQGFVFSCSVMHEALHNHYTQKSLSLSPGK

SEQ ID NO: 2270 - protein, 217 aa, synthetic construct
  REGION 1..217: note = Description of Artificial Sequence: Synthetic polypeptide
  REGION 1..217: note = Synthetic Construct
APELLGGPSVFLFPPKPKDTLYITREPEVTCVVVDVSHEDPEVKFNWYVDGVEVHNAKTKPREEQYNSTYRVVSVLTVLHQDWLNGKEYKCKVSNKALPAPIEKTISKAKGQPREPQVYTLPPSRDELTKNQVSLWCLVKGFYPSDIAVEWESFGTEWSSYKTTPPVLDSDGSFFLYSKLTVTKEEWQQGFVFSCSVMHEALHNHYTQKSLSLSPGK

SEQ ID NO: 2271 - protein, 217 aa, synthetic construct
  REGION 1..217: note = Description of Artificial Sequence: Synthetic polypeptide
  REGION 1..217: note = Synthetic Construct
APEAAGGPSVFLFPPKPKDTLYITREPEVTCVVVDVSHEDPEVKFNWYVDGVEVHNAKTKPREEQYNSTYRVVSVLTVLHQDWLNGKEYKCKVSNKALPAPIEKTISKAKGQPREPQVYTLPPSRDELTKNQVSLWCLVKGFYPSDIAVEWESFGTEWSSYKTTPPVLDSDGSFFLYSKLTVTKEEWQQGFVFSCSVMHEALHNHYTQKSLSLSPGK

SEQ ID NO: 2272 - protein, 217 aa, synthetic construct
  REGION 1..217: note = Description of Artificial Sequence: Synthetic polypeptide
  REGION 1..217: note = Synthetic Construct
APEAAGGPSVFLFPPKPKDTLYITREPEVTCVVVDVSHEDPEVKFNWYVDGVEVHNAKTKPREEQYNSTYRVVSVLTVLHQDWLNGKEYKCKVSNKALGAPIEKTISKAKGQPREPQVYTLPPSRDELTKNQVSLWCLVKGFYPSDIAVEWESFGTEWSSYKTTPPVLDSDGSFFLYSKLTVTKEEWQQGFVFSCSVMHEALHNHYTQKSLSLSPGK

SEQ ID NO: 2273 - protein, 217 aa, synthetic construct
  REGION 1..217: note = Description of Artificial Sequence: Synthetic polypeptide
  REGION 1..217: note = Synthetic Construct
APELLGGPSVFLFPPKPKDTLMISRTPEVTCVVVDVSHEDPEVKFNWYVDGVEVHNAKTKPREEQYNSTYRVVSVLTVLHQDWLNGKEYKCKVSNKALPAPIEKTISKAKGQPREPQVYTLPPSRDELTKNQVSLSCAVKGFYPSDIAVEWESFGTEWSSYKTTPPVLDSDGSFFLVSKLTVTKEEWQQGFVFSCSVMHEALHNHYTQKSLSLSPGK

SEQ ID NO: 2274 - protein, 217 aa, synthetic construct
  REGION 1..217: note = Description of Artificial Sequence: Synthetic polypeptide
  REGION 1..217: note = Synthetic Construct
APEAAGGPSVFLFPPKPKDTLMISRTPEVTCVVVDVSHEDPEVKFNWYVDGVEVHNAKTKPREEQYNSTYRVVSVLTVLHQDWLNGKEYKCKVSNKALPAPIEKTISKAKGQPREPQVYTLPPSRDELTKNQVSLSCAVKGFYPSDIAVEWESFGTEWSSYKTTPPVLDSDGSFFLVSKLTVTKEEWQQGFVFSCSVMHEALHNHYTQKSLSLSPGK

SEQ ID NO: 2275 - protein, 217 aa, synthetic construct
  REGION 1..217: note = Description of Artificial Sequence: Synthetic polypeptide
  REGION 1..217: note = Synthetic Construct
APEAAGGPSVFLFPPKPKDTLMISRTPEVTCVVVDVSHEDPEVKFNWYVDGVEVHNAKTKPREEQYNSTYRVVSVLTVLHQDWLNGKEYKCKVSNKALGAPIEKTISKAKGQPREPQVYTLPPSRDELTKNQVSLSCAVKGFYPSDIAVEWESFGTEWSSYKTTPPVLDSDGSFFLVSKLTVTKEEWQQGFVFSCSVMHEALHNHYTQKSLSLSPGK

SEQ ID NO: 2276 - protein, 217 aa, synthetic construct
  REGION 1..217: note = Description of Artificial Sequence: Synthetic polypeptide
  REGION 1..217: note = Synthetic Construct
APELLGGPSVFLFPPKPKDTLYITREPEVTCVVVDVSHEDPEVKFNWYVDGVEVHNAKTKPREEQYNSTYRVVSVLTVLHQDWLNGKEYKCKVSNKALPAPIEKTISKAKGQPREPQVYTLPPSRDELTKNQVSLSCAVKGFYPSDIAVEWESFGTEWSSYKTTPPVLDSDGSFFLVSKLTVTKEEWQQGFVFSCSVMHEALHNHYTQKSLSLSPGK

SEQ ID NO: 2277 - protein, 217 aa, synthetic construct
  REGION 1..217: note = Description of Artificial Sequence: Synthetic polypeptide
  REGION 1..217: note = Synthetic Construct
APEAAGGPSVFLFPPKPKDTLYITREPEVTCVVVDVSHEDPEVKFNWYVDGVEVHNAKTKPREEQYNSTYRVVSVLTVLHQDWLNGKEYKCKVSNKALPAPIEKTISKAKGQPREPQVYTLPPSRDELTKNQVSLSCAVKGFYPSDIAVEWESFGTEWSSYKTTPPVLDSDGSFFLVSKLTVTKEEWQQGFVFSCSVMHEALHNHYTQKSLSLSPGK

SEQ ID NO: 2278 - protein, 217 aa, synthetic construct
  REGION 1..217: note = Description of Artificial Sequence: Synthetic polypeptide
  REGION 1..217: note = Synthetic Construct
APEAAGGPSVFLFPPKPKDTLYITREPEVTCVVVDVSHEDPEVKFNWYVDGVEVHNAKTKPREEQYNSTYRVVSVLTVLHQDWLNGKEYKCKVSNKALGAPIEKTISKAKGQPREPQVYTLPPSRDELTKNQVSLSCAVKGFYPSDIAVEWESFGTEWSSYKTTPPVLDSDGSFFLVSKLTVTKEEWQQGFVFSCSVMHEALHNHYTQKSLSLSPGK

SEQ ID NO: 2279 - protein, 217 aa, synthetic construct
  REGION 1..217: note = Description of Artificial Sequence: Synthetic polypeptide
  REGION 1..217: note = Synthetic Construct
APELLGGPSVFLFPPKPKDTLMISRTPEVTCVVVDVSHEDPEVKFNWYVDGVEVHNAKTKPREEQYNSTYRVVSVLTVLHQDWLNGKEYKCKVSNKALPAPIEKTISKAKGQPREPQVYTLPPSRDELTKNQVSLWCLVKGFYPSDIAVEWESYGTEWANYKTTPPVLDSDGSFFLYSKLTVTKEEWQQGFVFSCSVMHEALHNHYTQKSLSLSPGK

SEQ ID NO: 2280 - protein, 217 aa, synthetic construct
  REGION 1..217: note = Description of Artificial Sequence: Synthetic polypeptide
  REGION 1..217: note = Synthetic Construct
APEAAGGPSVFLFPPKPKDTLMISRTPEVTCVVVDVSHEDPEVKFNWYVDGVEVHNAKTKPREEQYNSTYRVVSVLTVLHQDWLNGKEYKCKVSNKALPAPIEKTISKAKGQPREPQVYTLPPSRDELTKNQVSLWCLVKGFYPSDIAVEWESYGTEWANYKTTPPVLDSDGSFFLYSKLTVTKEEWQQGFVFSCSVMHEALHNHYTQKSLSLSPGK

SEQ ID NO: 2281 - protein, 217 aa, synthetic construct
  REGION 1..217: note = Description of Artificial Sequence: Synthetic polypeptide
  REGION 1..217: note = Synthetic Construct
APEAAGGPSVFLFPPKPKDTLMISRTPEVTCVVVDVSHEDPEVKFNWYVDGVEVHNAKTKPREEQYNSTYRVVSVLTVLHQDWLNGKEYKCKVSNKALGAPIEKTISKAKGQPREPQVYTLPPSRDELTKNQVSLWCLVKGFYPSDIAVEWESYGTEWANYKTTPPVLDSDGSFFLYSKLTVTKEEWQQGFVFSCSVMHEALHNHYTQKSLSLSPGK

SEQ ID NO: 2282 - protein, 217 aa, synthetic construct
  REGION 1..217: note = Description of Artificial Sequence: Synthetic polypeptide
  REGION 1..217: note = Synthetic Construct
APELLGGPSVFLFPPKPKDTLYITREPEVTCVVVDVSHEDPEVKFNWYVDGVEVHNAKTKPREEQYNSTYRVVSVLTVLHQDWLNGKEYKCKVSNKALPAPIEKTISKAKGQPREPQVYTLPPSRDELTKNQVSLWCLVKGFYPSDIAVEWESYGTEWANYKTTPPVLDSDGSFFLYSKLTVTKEEWQQGFVFSCSVMHEALHNHYTQKSLSLSPGK

SEQ ID NO: 2283 - protein, 217 aa, synthetic construct
  REGION 1..217: note = Description of Artificial Sequence: Synthetic polypeptide
  REGION 1..217: note = Synthetic Construct
APEAAGGPSVFLFPPKPKDTLYITREPEVTCVVVDVSHEDPEVKFNWYVDGVEVHNAKTKPREEQYNSTYRVVSVLTVLHQDWLNGKEYKCKVSNKALPAPIEKTISKAKGQPREPQVYTLPPSRDELTKNQVSLWCLVKGFYPSDIAVEWESYGTEWANYKTTPPVLDSDGSFFLYSKLTVTKEEWQQGFVFSCSVMHEALHNHYTQKSLSLSPGK

SEQ ID NO: 2284 - protein, 217 aa, synthetic construct
  REGION 1..217: note = Description of Artificial Sequence: Synthetic polypeptide
  REGION 1..217: note = Synthetic Construct
APEAAGGPSVFLFPPKPKDTLYITREPEVTCVVVDVSHEDPEVKFNWYVDGVEVHNAKTKPREEQYNSTYRVVSVLTVLHQDWLNGKEYKCKVSNKALGAPIEKTISKAKGQPREPQVYTLPPSRDELTKNQVSLWCLVKGFYPSDIAVEWESYGTEWANYKTTPPVLDSDGSFFLYSKLTVTKEEWQQGFVFSCSVMHEALHNHYTQKSLSLSPGK

SEQ ID NO: 2285 - protein, 217 aa, synthetic construct
  REGION 1..217: note = Description of Artificial Sequence: Synthetic polypeptide
  REGION 1..217: note = Synthetic Construct
APELLGGPSVFLFPPKPKDTLMISRTPEVTCVVVDVSHEDPEVKFNWYVDGVEVHNAKTKPREEQYNSTYRVVSVLTVLHQDWLNGKEYKCKVSNKALPAPIEKTISKAKGQPREPQVYTLPPSRDELTKNQVSLSCAVKGFYPSDIAVEWESYGTEWANYKTTPPVLDSDGSFFLVSKLTVTKEEWQQGFVFSCSVMHEALHNHYTQKSLSLSPGK

SEQ ID NO: 2286 - protein, 217 aa, synthetic construct
  REGION 1..217: note = Description of Artificial Sequence: Synthetic polypeptide
  REGION 1..217: note = Synthetic Construct
APEAAGGPSVFLFPPKPKDTLMISRTPEVTCVVVDVSHEDPEVKFNWYVDGVEVHNAKTKPREEQYNSTYRVVSVLTVLHQDWLNGKEYKCKVSNKALPAPIEKTISKAKGQPREPQVYTLPPSRDELTKNQVSLSCAVKGFYPSDIAVEWESYGTEWANYKTTPPVLDSDGSFFLVSKLTVTKEEWQQGFVFSCSVMHEALHNHYTQKSLSLSPGK

SEQ ID NO: 2287 - protein, 217 aa, synthetic construct
  REGION 1..217: note = Description of Artificial Sequence: Synthetic polypeptide
  REGION 1..217: note = Synthetic Construct
APEAAGGPSVFLFPPKPKDTLMISRTPEVTCVVVDVSHEDPEVKFNWYVDGVEVHNAKTKPREEQYNSTYRVVSVLTVLHQDWLNGKEYKCKVSNKALGAPIEKTISKAKGQPREPQVYTLPPSRDELTKNQVSLSCAVKGFYPSDIAVEWESYGTEWANYKTTPPVLDSDGSFFLVSKLTVTKEEWQQGFVFSCSVMHEALHNHYTQKSLSLSPGK

SEQ ID NO: 2288 - protein, 217 aa, synthetic construct
  REGION 1..217: note = Description of Artificial Sequence: Synthetic polypeptide
  REGION 1..217: note = Synthetic Construct
APELLGGPSVFLFPPKPKDTLYITREPEVTCVVVDVSHEDPEVKFNWYVDGVEVHNAKTKPREEQYNSTYRVVSVLTVLHQDWLNGKEYKCKVSNKALPAPIEKTISKAKGQPREPQVYTLPPSRDELTKNQVSLSCAVKGFYPSDIAVEWESYGTEWANYKTTPPVLDSDGSFFLVSKLTVTKEEWQQGFVFSCSVMHEALHNHYTQKSLSLSPGK

SEQ ID NO: 2289 - protein, 217 aa, synthetic construct
  REGION 1..217: note = Description of Artificial Sequence: Synthetic polypeptide
  REGION 1..217: note = Synthetic Construct
APEAAGGPSVFLFPPKPKDTLYITREPEVTCVVVDVSHEDPEVKFNWYVDGVEVHNAKTKPREEQYNSTYRVVSVLTVLHQDWLNGKEYKCKVSNKALPAPIEKTISKAKGQPREPQVYTLPPSRDELTKNQVSLSCAVKGFYPSDIAVEWESYGTEWANYKTTPPVLDSDGSFFLVSKLTVTKEEWQQGFVFSCSVMHEALHNHYTQKSLSLSPGK

SEQ ID NO: 2290 - protein, 217 aa, synthetic construct
  REGION 1..217: note = Description of Artificial Sequence: Synthetic polypeptide
  REGION 1..217: note = Synthetic Construct
APEAAGGPSVFLFPPKPKDTLYITREPEVTCVVVDVSHEDPEVKFNWYVDGVEVHNAKTKPREEQYNSTYRVVSVLTVLHQDWLNGKEYKCKVSNKALGAPIEKTISKAKGQPREPQVYTLPPSRDELTKNQVSLSCAVKGFYPSDIAVEWESYGTEWANYKTTPPVLDSDGSFFLVSKLTVTKEEWQQGFVFSCSVMHEALHNHYTQKSLSLSPGK

SEQ ID NO: 2291 - protein, 217 aa, synthetic construct
  REGION 1..217: note = Description of Artificial Sequence: Synthetic polypeptide
  REGION 1..217: note = Synthetic Construct
APELLGGPSVFLFPPKPKDTLMISRTPEVTCVVVDVSHEDPEVKFNWYVDGVEVHNAKTKPREEQYNSTYRVVSVLTVLHQDWLNGKEYKCKVSNKALPAPIEKTISKAKGQPREPQVYTLPPSRDELTKNQVSLWCLVKGFYPSDIAVEWESYGTEWVNYKTTPPVLDSDGSFFLYSKLTVTKEEWQQGFVFSCSVMHEALHNHYTQKSLSLSPGK

SEQ ID NO: 2292 - protein, 217 aa, synthetic construct
  REGION 1..217: note = Description of Artificial Sequence: Synthetic polypeptide
  REGION 1..217: note = Synthetic Construct
APEAAGGPSVFLFPPKPKDTLMISRTPEVTCVVVDVSHEDPEVKFNWYVDGVEVHNAKTKPREEQYNSTYRVVSVLTVLHQDWLNGKEYKCKVSNKALPAPIEKTISKAKGQPREPQVYTLPPSRDELTKNQVSLWCLVKGFYPSDIAVEWESYGTEWVNYKTTPPVLDSDGSFFLYSKLTVTKEEWQQGFVFSCSVMHEALHNHYTQKSLSLSPGK

SEQ ID NO: 2293 - protein, 217 aa, synthetic construct
  REGION 1..217: note = Description of Artificial Sequence: Synthetic polypeptide
  REGION 1..217: note = Synthetic Construct
APEAAGGPSVFLFPPKPKDTLMISRTPEVTCVVVDVSHEDPEVKFNWYVDGVEVHNAKTKPREEQYNSTYRVVSVLTVLHQDWLNGKEYKCKVSNKALGAPIEKTISKAKGQPREPQVYTLPPSRDELTKNQVSLWCLVKGFYPSDIAVEWESYGTEWVNYKTTPPVLDSDGSFFLYSKLTVTKEEWQQGFVFSCSVMHEALHNHYTQKSLSLSPGK

SEQ ID NO: 2294 - protein, 217 aa, synthetic construct
  REGION 1..217: note = Description of Artificial Sequence: Synthetic polypeptide
  REGION 1..217: note = Synthetic Construct
APELLGGPSVFLFPPKPKDTLYITREPEVTCVVVDVSHEDPEVKFNWYVDGVEVHNAKTKPREEQYNSTYRVVSVLTVLHQDWLNGKEYKCKVSNKALPAPIEKTISKAKGQPREPQVYTLPPSRDELTKNQVSLWCLVKGFYPSDIAVEWESYGTEWVNYKTTPPVLDSDGSFFLYSKLTVTKEEWQQGFVFSCSVMHEALHNHYTQKSLSLSPGK

SEQ ID NO: 2295 - protein, 217 aa, synthetic construct
  REGION 1..217: note = Description of Artificial Sequence: Synthetic polypeptide
  REGION 1..217: note = Synthetic Construct
APEAAGGPSVFLFPPKPKDTLYITREPEVTCVVVDVSHEDPEVKFNWYVDGVEVHNAKTKPREEQYNSTYRVVSVLTVLHQDWLNGKEYKCKVSNKALPAPIEKTISKAKGQPREPQVYTLPPSRDELTKNQVSLWCLVKGFYPSDIAVEWESYGTEWVNYKTTPPVLDSDGSFFLYSKLTVTKEEWQQGFVFSCSVMHEALHNHYTQKSLSLSPGK

SEQ ID NO: 2296 - protein, 217 aa, synthetic construct
  REGION 1..217: note = Description of Artificial Sequence: Synthetic polypeptide
  REGION 1..217: note = Synthetic Construct
APEAAGGPSVFLFPPKPKDTLYITREPEVTCVVVDVSHEDPEVKFNWYVDGVEVHNAKTKPREEQYNSTYRVVSVLTVLHQDWLNGKEYKCKVSNKALGAPIEKTISKAKGQPREPQVYTLPPSRDELTKNQVSLWCLVKGFYPSDIAVEWESYGTEWVNYKTTPPVLDSDGSFFLYSKLTVTKEEWQQGFVFSCSVMHEALHNHYTQKSLSLSPGK

SEQ ID NO: 2297 - protein, 217 aa, synthetic construct
  REGION 1..217: note = Description of Artificial Sequence: Synthetic polypeptide
  REGION 1..217: note = Synthetic Construct
APELLGGPSVFLFPPKPKDTLMISRTPEVTCVVVDVSHEDPEVKFNWYVDGVEVHNAKTKPREEQYNSTYRVVSVLTVLHQDWLNGKEYKCKVSNKALPAPIEKTISKAKGQPREPQVYTLPPSRDELTKNQVSLSCAVKGFYPSDIAVEWESYGTEWVNYKTTPPVLDSDGSFFLVSKLTVTKEEWQQGFVFSCSVMHEALHNHYTQKSLSLSPGK

SEQ ID NO: 2298 - protein, 217 aa, synthetic construct
  REGION 1..217: note = Description of Artificial Sequence: Synthetic polypeptide
  REGION 1..217: note = Synthetic Construct
APEAAGGPSVFLFPPKPKDTLMISRTPEVTCVVVDVSHEDPEVKFNWYVDGVEVHNAKTKPREEQYNSTYRVVSVLTVLHQDWLNGKEYKCKVSNKALPAPIEKTISKAKGQPREPQVYTLPPSRDELTKNQVSLSCAVKGFYPSDIAVEWESYGTEWVNYKTTPPVLDSDGSFFLVSKLTVTKEEWQQGFVFSCSVMHEALHNHYTQKSLSLSPGK

SEQ ID NO: 2299 - protein, 217 aa, synthetic construct
  REGION 1..217: note = Description of Artificial Sequence: Synthetic polypeptide
  REGION 1..217: note = Synthetic Construct
APEAAGGPSVFLFPPKPKDTLMISRTPEVTCVVVDVSHEDPEVKFNWYVDGVEVHNAKTKPREEQYNSTYRVVSVLTVLHQDWLNGKEYKCKVSNKALGAPIEKTISKAKGQPREPQVYTLPPSRDELTKNQVSLSCAVKGFYPSDIAVEWESYGTEWVNYKTTPPVLDSDGSFFLVSKLTVTKEEWQQGFVFSCSVMHEALHNHYTQKSLSLSPGK

SEQ ID NO: 2300 - protein, 217 aa, synthetic construct
  REGION 1..217: note = Description of Artificial Sequence: Synthetic polypeptide
  REGION 1..217: note = Synthetic Construct
APELLGGPSVFLFPPKPKDTLYITREPEVTCVVVDVSHEDPEVKFNWYVDGVEVHNAKTKPREEQYNSTYRVVSVLTVLHQDWLNGKEYKCKVSNKALPAPIEKTISKAKGQPREPQVYTLPPSRDELTKNQVSLSCAVKGFYPSDIAVEWESYGTEWVNYKTTPPVLDSDGSFFLVSKLTVTKEEWQQGFVFSCSVMHEALHNHYTQKSLSLSPGK

SEQ ID NO: 2301 - protein, 217 aa, synthetic construct
  REGION 1..217: note = Description of Artificial Sequence: Synthetic polypeptide
  REGION 1..217: note = Synthetic Construct
APEAAGGPSVFLFPPKPKDTLYITREPEVTCVVVDVSHEDPEVKFNWYVDGVEVHNAKTKPREEQYNSTYRVVSVLTVLHQDWLNGKEYKCKVSNKALPAPIEKTISKAKGQPREPQVYTLPPSRDELTKNQVSLSCAVKGFYPSDIAVEWESYGTEWVNYKTTPPVLDSDGSFFLVSKLTVTKEEWQQGFVFSCSVMHEALHNHYTQKSLSLSPGK

SEQ ID NO: 2302 - protein, 217 aa, synthetic construct
  REGION 1..217: note = Description of Artificial Sequence: Synthetic polypeptide
  REGION 1..217: note = Synthetic Construct
APEAAGGPSVFLFPPKPKDTLYITREPEVTCVVVDVSHEDPEVKFNWYVDGVEVHNAKTKPREEQYNSTYRVVSVLTVLHQDWLNGKEYKCKVSNKALGAPIEKTISKAKGQPREPQVYTLPPSRDELTKNQVSLSCAVKGFYPSDIAVEWESYGTEWVNYKTTPPVLDSDGSFFLVSKLTVTKEEWQQGFVFSCSVMHEALHNHYTQKSLSLSPGK

SEQ ID NO: 2303 - protein, 217 aa, synthetic construct
  REGION 1..217: note = Description of Artificial Sequence: Synthetic polypeptide
  REGION 1..217: note = Synthetic Construct
APELLGGPSVFLFPPKPKDTLMISRTPEVTCVVVDVSHEDPEVKFNWYVDGVEVHNAKTKPREEQYNSTYRVVSVLTVLHQDWLNGKEYKCKVSNKALPAPIEKTISKAKGQPREPQVYTLPPSRDELTKNQVSLWCLVKGFYPSDIAVEWESYGTEWSNYKTTPPVLDSDGSFFLYSKLTVSKEEWQQGFVFSCSVMHEALHNHYTQKSLSLSPGK

SEQ ID NO: 2304 - protein, 217 aa, synthetic construct
  REGION 1..217: note = Description of Artificial Sequence: Synthetic polypeptide
  REGION 1..217: note = Synthetic Construct
APEAAGGPSVFLFPPKPKDTLMISRTPEVTCVVVDVSHEDPEVKFNWYVDGVEVHNAKTKPREEQYNSTYRVVSVLTVLHQDWLNGKEYKCKVSNKALPAPIEKTISKAKGQPREPQVYTLPPSRDELTKNQVSLWCLVKGFYPSDIAVEWESYGTEWSNYKTTPPVLDSDGSFFLYSKLTVSKEEWQQGFVFSCSVMHEALHNHYTQKSLSLSPGK

SEQ ID NO: 2305 - protein, 217 aa, synthetic construct
  REGION 1..217: note = Description of Artificial Sequence: Synthetic polypeptide
  REGION 1..217: note = Synthetic Construct
APEAAGGPSVFLFPPKPKDTLMISRTPEVTCVVVDVSHEDPEVKFNWYVDGVEVHNAKTKPREEQYNSTYRVVSVLTVLHQDWLNGKEYKCKVSNKALGAPIEKTISKAKGQPREPQVYTLPPSRDELTKNQVSLWCLVKGFYPSDIAVEWESYGTEWSNYKTTPPVLDSDGSFFLYSKLTVSKEEWQQGFVFSCSVMHEALHNHYTQKSLSLSPGK

SEQ ID NO: 2306 - protein, 217 aa, synthetic construct
  REGION 1..217: note = Description of Artificial Sequence: Synthetic polypeptide
  REGION 1..217: note = Synthetic Construct
APELLGGPSVFLFPPKPKDTLYITREPEVTCVVVDVSHEDPEVKFNWYVDGVEVHNAKTKPREEQYNSTYRVVSVLTVLHQDWLNGKEYKCKVSNKALPAPIEKTISKAKGQPREPQVYTLPPSRDELTKNQVSLWCLVKGFYPSDIAVEWESYGTEWSNYKTTPPVLDSDGSFFLYSKLTVSKEEWQQGFVFSCSVMHEALHNHYTQKSLSLSPGK

SEQ ID NO: 2307 - protein, 217 aa, synthetic construct
  REGION 1..217: note = Description of Artificial Sequence: Synthetic polypeptide
  REGION 1..217: note = Synthetic Construct
APEAAGGPSVFLFPPKPKDTLYITREPEVTCVVVDVSHEDPEVKFNWYVDGVEVHNAKTKPREEQYNSTYRVVSVLTVLHQDWLNGKEYKCKVSNKALPAPIEKTISKAKGQPREPQVYTLPPSRDELTKNQVSLWCLVKGFYPSDIAVEWESYGTEWSNYKTTPPVLDSDGSFFLYSKLTVSKEEWQQGFVFSCSVMHEALHNHYTQKSLSLSPGK

SEQ ID NO: 2308 - protein, 217 aa, synthetic construct
  REGION 1..217: note = Description of Artificial Sequence: Synthetic polypeptide
  REGION 1..217: note = Synthetic Construct
APEAAGGPSVFLFPPKPKDTLYITREPEVTCVVVDVSHEDPEVKFNWYVDGVEVHNAKTKPREEQYNSTYRVVSVLTVLHQDWLNGKEYKCKVSNKALGAPIEKTISKAKGQPREPQVYTLPPSRDELTKNQVSLWCLVKGFYPSDIAVEWESYGTEWSNYKTTPPVLDSDGSFFLYSKLTVSKEEWQQGFVFSCSVMHEALHNHYTQKSLSLSPGK

SEQ ID NO: 2309 - protein, 217 aa, synthetic construct
  REGION 1..217: note = Description of Artificial Sequence: Synthetic polypeptide
  REGION 1..217: note = Synthetic Construct
APELLGGPSVFLFPPKPKDTLMISRTPEVTCVVVDVSHEDPEVKFNWYVDGVEVHNAKTKPREEQYNSTYRVVSVLTVLHQDWLNGKEYKCKVSNKALPAPIEKTISKAKGQPREPQVYTLPPSRDELTKNQVSLSCAVKGFYPSDIAVEWESYGTEWSNYKTTPPVLDSDGSFFLVSKLTVSKEEWQQGFVFSCSVMHEALHNHYTQKSLSLSPGK

SEQ ID NO: 2310 - protein, 217 aa, synthetic construct
  REGION 1..217: note = Description of Artificial Sequence: Synthetic polypeptide
  REGION 1..217: note = Synthetic Construct
APEAAGGPSVFLFPPKPKDTLMISRTPEVTCVVVDVSHEDPEVKFNWYVDGVEVHNAKTKPREEQYNSTYRVVSVLTVLHQDWLNGKEYKCKVSNKALPAPIEKTISKAKGQPREPQVYTLPPSRDELTKNQVSLSCAVKGFYPSDIAVEWESYGTEWSNYKTTPPVLDSDGSFFLVSKLTVSKEEWQQGFVFSCSVMHEALHNHYTQKSLSLSPGK

SEQ ID NO: 2311 - protein, 217 aa, synthetic construct
  REGION 1..217: note = Description of Artificial Sequence: Synthetic polypeptide
  REGION 1..217: note = Synthetic Construct
APEAAGGPSVFLFPPKPKDTLMISRTPEVTCVVVDVSHEDPEVKFNWYVDGVEVHNAKTKPREEQYNSTYRVVSVLTVLHQDWLNGKEYKCKVSNKALGAPIEKTISKAKGQPREPQVYTLPPSRDELTKNQVSLSCAVKGFYPSDIAVEWESYGTEWSNYKTTPPVLDSDGSFFLVSKLTVSKEEWQQGFVFSCSVMHEALHNHYTQKSLSLSPGK

SEQ ID NO: 2312 - protein, 217 aa, synthetic construct
  REGION 1..217: note = Description of Artificial Sequence: Synthetic polypeptide
  REGION 1..217: note = Synthetic Construct
APELLGGPSVFLFPPKPKDTLYITREPEVTCVVVDVSHEDPEVKFNWYVDGVEVHNAKTKPREEQYNSTYRVVSVLTVLHQDWLNGKEYKCKVSNKALPAPIEKTISKAKGQPREPQVYTLPPSRDELTKNQVSLSCAVKGFYPSDIAVEWESYGTEWSNYKTTPPVLDSDGSFFLVSKLTVSKEEWQQGFVFSCSVMHEALHNHYTQKSLSLSPGK

SEQ ID NO: 2313 - protein, 217 aa, synthetic construct
  REGION 1..217: note = Description of Artificial Sequence: Synthetic polypeptide
  REGION 1..217: note = Synthetic Construct
APEAAGGPSVFLFPPKPKDTLYITREPEVTCVVVDVSHEDPEVKFNWYVDGVEVHNAKTKPREEQYNSTYRVVSVLTVLHQDWLNGKEYKCKVSNKALPAPIEKTISKAKGQPREPQVYTLPPSRDELTKNQVSLSCAVKGFYPSDIAVEWESYGTEWSNYKTTPPVLDSDGSFFLVSKLTVSKEEWQQGFVFSCSVMHEALHNHYTQKSLSLSPGK

SEQ ID NO: 2314 - protein, 217 aa, synthetic construct
  REGION 1..217: note = Description of Artificial Sequence: Synthetic polypeptide
  REGION 1..217: note = Synthetic Construct
APEAAGGPSVFLFPPKPKDTLYITREPEVTCVVVDVSHEDPEVKFNWYVDGVEVHNAKTKPREEQYNSTYRVVSVLTVLHQDWLNGKEYKCKVSNKALGAPIEKTISKAKGQPREPQVYTLPPSRDELTKNQVSLSCAVKGFYPSDIAVEWESYGTEWSNYKTTPPVLDSDGSFFLVSKLTVSKEEWQQGFVFSCSVMHEALHNHYTQKSLSLSPGK

SEQ ID NO: 2315 - protein, 217 aa, synthetic construct
  REGION 1..217: note = Description of Artificial Sequence: Synthetic polypeptide
  REGION 1..217: note = Synthetic Construct
APELLGGPSVFLFPPKPKDTLMISRTPEVTCVVVDVSHEDPEVKFNWYVDGVEVHNAKTKPREEQYNSTYRVVSVLTVLHQDWLNGKEYKCKVSNKALPAPIEKTISKAKGQPREPQVYTLPPSRDELTKNQVSLWCLVKGFYPSDIAVLWESYGTEWASYKTTPPVLDSDGSFFLYSKLTVTKEEWQQGFVFSCSVMHEALHNHYTQKSLSLSPGK

SEQ ID NO: 2316 - protein, 217 aa, synthetic construct
  REGION 1..217: note = Description of Artificial Sequence: Synthetic polypeptide
  REGION 1..217: note = Synthetic Construct
APEAAGGPSVFLFPPKPKDTLMISRTPEVTCVVVDVSHEDPEVKFNWYVDGVEVHNAKTKPREEQYNSTYRVVSVLTVLHQDWLNGKEYKCKVSNKALPAPIEKTISKAKGQPREPQVYTLPPSRDELTKNQVSLWCLVKGFYPSDIAVLWESYGTEWASYKTTPPVLDSDGSFFLYSKLTVTKEEWQQGFVFSCSVMHEALHNHYTQKSLSLSPGK

SEQ ID NO: 2317 - protein, 217 aa, synthetic construct
  REGION 1..217: note = Description of Artificial Sequence: Synthetic polypeptide
  REGION 1..217: note = Synthetic Construct
APEAAGGPSVFLFPPKPKDTLMISRTPEVTCVVVDVSHEDPEVKFNWYVDGVEVHNAKTKPREEQYNSTYRVVSVLTVLHQDWLNGKEYKCKVSNKALGAPIEKTISKAKGQPREPQVYTLPPSRDELTKNQVSLWCLVKGFYPSDIAVLWESYGTEWASYKTTPPVLDSDGSFFLYSKLTVTKEEWQQGFVFSCSVMHEALHNHYTQKSLSLSPGK

SEQ ID NO: 2318 - protein, 217 aa, synthetic construct
  REGION 1..217: note = Description of Artificial Sequence: Synthetic polypeptide
  REGION 1..217: note = Synthetic Construct
APELLGGPSVFLFPPKPKDTLYITREPEVTCVVVDVSHEDPEVKFNWYVDGVEVHNAKTKPREEQYNSTYRVVSVLTVLHQDWLNGKEYKCKVSNKALPAPIEKTISKAKGQPREPQVYTLPPSRDELTKNQVSLWCLVKGFYPSDIAVLWESYGTEWASYKTTPPVLDSDGSFFLYSKLTVTKEEWQQGFVFSCSVMHEALHNHYTQKSLSLSPGK

SEQ ID NO: 2319 - protein, 217 aa, synthetic construct
  REGION 1..217: note = Description of Artificial Sequence: Synthetic polypeptide
  REGION 1..217: note = Synthetic Construct
APEAAGGPSVFLFPPKPKDTLYITREPEVTCVVVDVSHEDPEVKFNWYVDGVEVHNAKTKPREEQYNSTYRVVSVLTVLHQDWLNGKEYKCKVSNKALPAPIEKTISKAKGQPREPQVYTLPPSRDELTKNQVSLWCLVKGFYPSDIAVLWESYGTEWASYKTTPPVLDSDGSFFLYSKLTVTKEEWQQGFVFSCSVMHEALHNHYTQKSLSLSPGK

SEQ ID NO: 2320 - protein, 217 aa, synthetic construct
  REGION 1..217: note = Description of Artificial Sequence: Synthetic polypeptide
  REGION 1..217: note = Synthetic Construct
APEAAGGPSVFLFPPKPKDTLYITREPEVTCVVVDVSHEDPEVKFNWYVDGVEVHNAKTKPREEQYNSTYRVVSVLTVLHQDWLNGKEYKCKVSNKALGAPIEKTISKAKGQPREPQVYTLPPSRDELTKNQVSLWCLVKGFYPSDIAVLWESYGTEWASYKTTPPVLDSDGSFFLYSKLTVTKEEWQQGFVFSCSVMHEALHNHYTQKSLSLSPGK

SEQ ID NO: 2321 - protein, 217 aa, synthetic construct
  REGION 1..217: note = Description of Artificial Sequence: Synthetic polypeptide
  REGION 1..217: note = Synthetic Construct
APELLGGPSVFLFPPKPKDTLMISRTPEVTCVVVDVSHEDPEVKFNWYVDGVEVHNAKTKPREEQYNSTYRVVSVLTVLHQDWLNGKEYKCKVSNKALPAPIEKTISKAKGQPREPQVYTLPPSRDELTKNQVSLSCAVKGFYPSDIAVLWESYGTEWASYKTTPPVLDSDGSFFLVSKLTVTKEEWQQGFVFSCSVMHEALHNHYTQKSLSLSPGK

SEQ ID NO: 2322 - protein, 217 aa, synthetic construct
  REGION 1..217: note = Description of Artificial Sequence: Synthetic polypeptide
  REGION 1..217: note = Synthetic Construct
APEAAGGPSVFLFPPKPKDTLMISRTPEVTCVVVDVSHEDPEVKFNWYVDGVEVHNAKTKPREEQYNSTYRVVSVLTVLHQDWLNGKEYKCKVSNKALPAPIEKTISKAKGQPREPQVYTLPPSRDELTKNQVSLSCAVKGFYPSDIAVLWESYGTEWASYKTTPPVLDSDGSFFLVSKLTVTKEEWQQGFVFSCSVMHEALHNHYTQKSLSLSPGK

SEQ ID NO: 2323 - protein, 217 aa, synthetic construct
  REGION 1..217: note = Description of Artificial Sequence: Synthetic polypeptide
  REGION 1..217: note = Synthetic Construct
APEAAGGPSVFLFPPKPKDTLMISRTPEVTCVVVDVSHEDPEVKFNWYVDGVEVHNAKTKPREEQYNSTYRVVSVLTVLHQDWLNGKEYKCKVSNKALGAPIEKTISKAKGQPREPQVYTLPPSRDELTKNQVSLSCAVKGFYPSDIAVLWESYGTEWASYKTTPPVLDSDGSFFLVSKLTVTKEEWQQGFVFSCSVMHEALHNHYTQKSLSLSPGK

SEQ ID NO: 2324 - protein, 217 aa, synthetic construct
  REGION 1..217: note = Description of Artificial Sequence: Synthetic polypeptide
  REGION 1..217: note = Synthetic Construct
APELLGGPSVFLFPPKPKDTLYITREPEVTCVVVDVSHEDPEVKFNWYVDGVEVHNAKTKPREEQYNSTYRVVSVLTVLHQDWLNGKEYKCKVSNKALPAPIEKTISKAKGQPREPQVYTLPPSRDELTKNQVSLSCAVKGFYPSDIAVLWESYGTEWASYKTTPPVLDSDGSFFLVSKLTVTKEEWQQGFVFSCSVMHEALHNHYTQKSLSLSPGK

SEQ ID NO: 2325 - protein, 217 aa, synthetic construct
  REGION 1..217: note = Description of Artificial Sequence: Synthetic polypeptide
  REGION 1..217: note = Synthetic Construct
APEAAGGPSVFLFPPKPKDTLYITREPEVTCVVVDVSHEDPEVKFNWYVDGVEVHNAKTKPREEQYNSTYRVVSVLTVLHQDWLNGKEYKCKVSNKALPAPIEKTISKAKGQPREPQVYTLPPSRDELTKNQVSLSCAVKGFYPSDIAVLWESYGTEWASYKTTPPVLDSDGSFFLVSKLTVTKEEWQQGFVFSCSVMHEALHNHYTQKSLSLSPGK

SEQ ID NO: 2326 - protein, 217 aa, synthetic construct
  REGION 1..217: note = Description of Artificial Sequence: Synthetic polypeptide
  REGION 1..217: note = Synthetic Construct
APEAAGGPSVFLFPPKPKDTLYITREPEVTCVVVDVSHEDPEVKFNWYVDGVEVHNAKTKPREEQYNSTYRVVSVLTVLHQDWLNGKEYKCKVSNKALGAPIEKTISKAKGQPREPQVYTLPPSRDELTKNQVSLSCAVKGFYPSDIAVLWESYGTEWASYKTTPPVLDSDGSFFLVSKLTVTKEEWQQGFVFSCSVMHEALHNHYTQKSLSLSPGK

SEQ ID NO: 2327 - protein, 217 aa, synthetic construct
  REGION 1..217: note = Description of Artificial Sequence: Synthetic polypeptide
  REGION 1..217: note = Synthetic Construct
APELLGGPSVFLFPPKPKDTLMISRTPEVTCVVVDVSHEDPEVKFNWYVDGVEVHNAKTKPREEQYNSTYRVVSVLTVLHQDWLNGKEYKCKVSNKALPAPIEKTISKAKGQPREPQVYTLPPSRDELTKNQVSLWCLVKGFYPSDIAVEWESYGTEWSNYKTTPPVLDSDGSFFLYSKLTVTKEEWQQGFVFSCSVMHEALHNHYTQKSLSLSPGK

SEQ ID NO: 2328 - protein, 217 aa, synthetic construct
  REGION 1..217: note = Description of Artificial Sequence: Synthetic polypeptide
  REGION 1..217: note = Synthetic Construct
APEAAGGPSVFLFPPKPKDTLMISRTPEVTCVVVDVSHEDPEVKFNWYVDGVEVHNAKTKPREEQYNSTYRVVSVLTVLHQDWLNGKEYKCKVSNKALPAPIEKTISKAKGQPREPQVYTLPPSRDELTKNQVSLWCLVKGFYPSDIAVEWESYGTEWSNYKTTPPVLDSDGSFFLYSKLTVTKEEWQQGFVFSCSVMHEALHNHYTQKSLSLSPGK

SEQ ID NO: 2329 - protein, 217 aa, synthetic construct
  REGION 1..217: note = Description of Artificial Sequence: Synthetic polypeptide
  REGION 1..217: note = Synthetic Construct
APEAAGGPSVFLFPPKPKDTLMISRTPEVTCVVVDVSHEDPEVKFNWYVDGVEVHNAKTKPREEQYNSTYRVVSVLTVLHQDWLNGKEYKCKVSNKALGAPIEKTISKAKGQPREPQVYTLPPSRDELTKNQVSLWCLVKGFYPSDIAVEWESYGTEWSNYKTTPPVLDSDGSFFLYSKLTVTKEEWQQGFVFSCSVMHEALHNHYTQKSLSLSPGK

SEQ ID NO: 2330 - protein, 217 aa, synthetic construct
  REGION 1..217: note = Description of Artificial Sequence: Synthetic polypeptide
  REGION 1..217: note = Synthetic Construct
APELLGGPSVFLFPPKPKDTLYITREPEVTCVVVDVSHEDPEVKFNWYVDGVEVHNAKTKPREEQYNSTYRVVSVLTVLHQDWLNGKEYKCKVSNKALPAPIEKTISKAKGQPREPQVYTLPPSRDELTKNQVSLWCLVKGFYPSDIAVEWESYGTEWSNYKTTPPVLDSDGSFFLYSKLTVTKEEWQQGFVFSCSVMHEALHNHYTQKSLSLSPGK

SEQ ID NO: 2331 - protein, 217 aa, synthetic construct
  REGION 1..217: note = Description of Artificial Sequence: Synthetic polypeptide
  REGION 1..217: note = Synthetic Construct
APEAAGGPSVFLFPPKPKDTLYITREPEVTCVVVDVSHEDPEVKFNWYVDGVEVHNAKTKPREEQYNSTYRVVSVLTVLHQDWLNGKEYKCKVSNKALPAPIEKTISKAKGQPREPQVYTLPPSRDELTKNQVSLWCLVKGFYPSDIAVEWESYGTEWSNYKTTPPVLDSDGSFFLYSKLTVTKEEWQQGFVFSCSVMHEALHNHYTQKSLSLSPGK

SEQ ID NO: 2332 - protein, 217 aa, synthetic construct
  REGION 1..217: note = Description of Artificial Sequence: Synthetic polypeptide
  REGION 1..217: note = Synthetic Construct
APEAAGGPSVFLFPPKPKDTLYITREPEVTCVVVDVSHEDPEVKFNWYVDGVEVHNAKTKPREEQYNSTYRVVSVLTVLHQDWLNGKEYKCKVSNKALGAPIEKTISKAKGQPREPQVYTLPPSRDELTKNQVSLWCLVKGFYPSDIAVEWESYGTEWSNYKTTPPVLDSDGSFFLYSKLTVTKEEWQQGFVFSCSVMHEALHNHYTQKSLSLSPGK

SEQ ID NO: 2333 - protein, 217 aa, synthetic construct
  REGION 1..217: note = Description of Artificial Sequence: Synthetic polypeptide
  REGION 1..217: note = Synthetic Construct
APELLGGPSVFLFPPKPKDTLMISRTPEVTCVVVDVSHEDPEVKFNWYVDGVEVHNAKTKPREEQYNSTYRVVSVLTVLHQDWLNGKEYKCKVSNKALPAPIEKTISKAKGQPREPQVYTLPPSRDELTKNQVSLSCAVKGFYPSDIAVEWESYGTEWSNYKTTPPVLDSDGSFFLVSKLTVTKEEWQQGFVFSCSVMHEALHNHYTQKSLSLSPGK

SEQ ID NO: 2334 - protein, 217 aa, synthetic construct
  REGION 1..217: note = Description of Artificial Sequence: Synthetic polypeptide
  REGION 1..217: note = Synthetic Construct
APEAAGGPSVFLFPPKPKDTLMISRTPEVTCVVVDVSHEDPEVKFNWYVDGVEVHNAKTKPREEQYNSTYRVVSVLTVLHQDWLNGKEYKCKVSNKALPAPIEKTISKAKGQPREPQVYTLPPSRDELTKNQVSLSCAVKGFYPSDIAVEWESYGTEWSNYKTTPPVLDSDGSFFLVSKLTVTKEEWQQGFVFSCSVMHEALHNHYTQKSLSLSPGK

SEQ ID NO: 2335 - protein, 217 aa, synthetic construct
  REGION 1..217: note = Description of Artificial Sequence: Synthetic polypeptide
  REGION 1..217: note = Synthetic Construct
APEAAGGPSVFLFPPKPKDTLMISRTPEVTCVVVDVSHEDPEVKFNWYVDGVEVHNAKTKPREEQYNSTYRVVSVLTVLHQDWLNGKEYKCKVSNKALGAPIEKTISKAKGQPREPQVYTLPPSRDELTKNQVSLSCAVKGFYPSDIAVEWESYGTEWSNYKTTPPVLDSDGSFFLVSKLTVTKEEWQQGFVFSCSVMHEALHNHYTQKSLSLSPGK

SEQ ID NO: 2336 - protein, 217 aa, synthetic construct
  REGION 1..217: note = Description of Artificial Sequence: Synthetic polypeptide
  REGION 1..217: note = Synthetic Construct
APELLGGPSVFLFPPKPKDTLYITREPEVTCVVVDVSHEDPEVKFNWYVDGVEVHNAKTKPREEQYNSTYRVVSVLTVLHQDWLNGKEYKCKVSNKALPAPIEKTISKAKGQPREPQVYTLPPSRDELTKNQVSLSCAVKGFYPSDIAVEWESYGTEWSNYKTTPPVLDSDGSFFLVSKLTVTKEEWQQGFVFSCSVMHEALHNHYTQKSLSLSPGK

SEQ ID NO: 2337 - protein, 217 aa, synthetic construct
  REGION 1..217: note = Description of Artificial Sequence: Synthetic polypeptide
  REGION 1..217: note = Synthetic Construct
APEAAGGPSVFLFPPKPKDTLYITREPEVTCVVVDVSHEDPEVKFNWYVDGVEVHNAKTKPREEQYNSTYRVVSVLTVLHQDWLNGKEYKCKVSNKALPAPIEKTISKAKGQPREPQVYTLPPSRDELTKNQVSLSCAVKGFYPSDIAVEWESYGTEWSNYKTTPPVLDSDGSFFLVSKLTVTKEEWQQGFVFSCSVMHEALHNHYTQKSLSLSPGK

SEQ ID NO: 2338 - protein, 217 aa, synthetic construct
  REGION 1..217: note = Description of Artificial Sequence: Synthetic polypeptide
  REGION 1..217: note = Synthetic Construct
APEAAGGPSVFLFPPKPKDTLYITREPEVTCVVVDVSHEDPEVKFNWYVDGVEVHNAKTKPREEQYNSTYRVVSVLTVLHQDWLNGKEYKCKVSNKALGAPIEKTISKAKGQPREPQVYTLPPSRDELTKNQVSLSCAVKGFYPSDIAVEWESYGTEWSNYKTTPPVLDSDGSFFLVSKLTVTKEEWQQGFVFSCSVMHEALHNHYTQKSLSLSPGK

SEQ ID NO: 2339 - protein, 7 aa, synthetic construct
  REGION 1..7: note = Description of Artificial Sequence: Synthetic peptide
  REGION 1..7: note = Synthetic Construct
  MOD_RES 2: note = any amino acid
YXTEWSS

SEQ ID NO: 2340 - skipped

SEQ ID NO: 2341 - DNA, 20 bp, synthetic construct
  misc_feature 1..20: note = Description of Artificial Sequence: Synthetic oligonucleotide
  misc_feature 1..20: note = Synthetic Construct
  source 1..20: mol_type = other DNA
ggacagggatccagagttcc

SEQ ID NO: 2342 - DNA, 20 bp, synthetic construct
  misc_feature 1..20: note = Description of Artificial Sequence: Synthetic oligonucleotide
  misc_feature 1..20: note = Synthetic Construct
  source 1..20: mol_type = other DNA
agctgggaaggtgtgcacac

SEQ ID NO: 2343 - DNA, 19 bp, synthetic construct
  misc_feature 1..19: note = Description of Artificial Sequence: Synthetic oligonucleotide
  misc_feature 1..19: note = Synthetic Construct
  source 1..19: mol_type = other DNA
caggggccagtggatagac

SEQ ID NO: 2344 - DNA, 20 bp, synthetic construct
  misc_feature 1..20: note = Description of Artificial Sequence: Synthetic oligonucleotide
  misc_feature 1..20: note = Synthetic Construct
  source 1..20: mol_type = other DNA
gacattgatgtctttggggt

SEQ ID NO: 2345 - DNA, 20 bp, synthetic construct
  misc_feature 1..20: note = Description of Artificial Sequence: Synthetic oligonucleotide
  misc_feature 1..20: note = Synthetic Construct
  source 1..20: mol_type = other DNA
ttcactgccatcaatcttcc

SEQ ID NO: 2346 - protein, 117 aa, synthetic construct
  REGION 1..117: note = Description of Artificial Sequence: Synthetic polypeptide
  REGION 1..117: note = Synthetic Construct
EVQLQQSGPELVKPGASVKMSCKASGYTFTDYNMHWVKQSHGKSLEWIGYINPNNGGTTYNQKFKGKATLTVNKSSSTAYMELRSLTSEDSAVYYCATYNNHYFDSWGQGTTLTVSS

SEQ ID NO: 2347 - protein, 10 aa, synthetic construct
  REGION 1..10: note = Description of Artificial Sequence: Synthetic peptide
  REGION 1..10: note = Synthetic Construct
GYTFTDYNMH

SEQ ID NO: 2348 - protein, 17 aa, synthetic construct
  REGION 1..17: note = Description of Artificial Sequence: Synthetic peptide
  REGION 1..17: note = Synthetic Construct
YINPNNGGTTYNQKFKG

SEQ ID NO: 2349 - protein, 10 aa, synthetic construct
  REGION 1..10: note = Description of Artificial Sequence: Synthetic peptide
  REGION 1..10: note = Synthetic Construct
ATYNNHYFDS

SEQ ID NO: 2350 - protein, 107 aa, synthetic construct
  REGION 1..107: note = Description of Artificial Sequence: Synthetic polypeptide
  REGION 1..107: note = Synthetic Construct
DIQMTQTTSSLSASLGDRVTISCSASQGISNYLNWYQQKPDGTVKLLIYYTSNLHSGVPSRFSGSGSGTDYSLTISNLEPEDIATYYCQQYSNLPYTFGGGTKLEIK

SEQ ID NO: 2351 - protein, 11 aa, synthetic construct
  REGION 1..11: note = Description of Artificial Sequence: Synthetic peptide
  REGION 1..11: note = Synthetic Construct
SASQGISNYLN

SEQ ID NO: 2352 - protein, 7 aa, synthetic construct
  REGION 1..7: note = Description of Artificial Sequence: Synthetic peptide
  REGION 1..7: note = Synthetic Construct
YTSNLHS

SEQ ID NO: 2353 - protein, 9 aa, synthetic construct
  REGION 1..9: note = Description of Artificial Sequence: Synthetic peptide
  REGION 1..9: note = Synthetic Construct
QQYSNLPYT

SEQ ID NO: 2354 - protein, 118 aa, synthetic construct
  REGION 1..118: note = Description of Artificial Sequence: Synthetic polypeptide
  REGION 1..118: note = Synthetic Construct
QVHLQQSGPEVVRPGVSVKISCKGSGYTFTDYGMHWVKQSHAKSLEWIGVISTYNGNTSYNQKYKGKATVTVDKPSSTAYMELVRLTSEDSAIYYCARDFGYVPFDYWGQGTTLTVSS

SEQ ID NO: 2355 - protein, 10 aa, synthetic construct
  REGION 1..10: note = Description of Artificial Sequence: Synthetic peptide
  REGION 1..10: note = Synthetic Construct
GYTFTDYGMH

SEQ ID NO: 2356 - protein, 17 aa, synthetic construct
  REGION 1..17: note = Description of Artificial Sequence: Synthetic peptide
  REGION 1..17: note = Synthetic Construct
VISTYNGNTSYNQKYKG

SEQ ID NO: 2357 - protein, 11 aa, synthetic construct
  REGION 1..11: note = Description of Artificial Sequence: Synthetic peptide
  REGION 1..11: note = Synthetic Construct
ARDFGYVPFDY

SEQ ID NO: 2358 - protein, 112 aa, synthetic construct
  REGION 1..112: note = Description of Artificial Sequence: Synthetic polypeptide
  REGION 1..112: note = Synthetic Construct
DVVMTQTPLTLSVTIGQPASISCKSSQSLLDSDGKTYLNWLLQRPGQSPKRLIYLVSYLDSGVPDRFTGSGSGTDFTLKISRVEADDLGVYYCWQGTHFPYTFGGGTKLEIK

SEQ ID NO: 2359 - protein, 7 aa, synthetic construct
  REGION 1..7: note = Description of Artificial Sequence: Synthetic peptide
  REGION 1..7: note = Synthetic Construct
LVSYLDS

SEQ ID NO: 2360-2366 - skipped (7 entries)

SEQ ID NO: 2367 - protein, 15 aa, synthetic construct
  REGION 1..15: note = Description of Artificial Sequence: Synthetic peptide
  REGION 1..15: note = Synthetic Construct
  MOD_RES 3: note = Gly or Asn
  MOD_RES 4: note = Asp or Gly
  MOD_RES 5: note = Asp or Ile
  MOD_RES 6: note = Ser or Thr
  MOD_RES 7: note = Tyr or Thr
  MOD_RES 8: note = Arg or Ala
  MOD_RES 9: note = Arg or Gly
  MOD_RES 10: note = Gly or Tyr
  MOD_RES 13: note = Leu or Met
ARXXXXXXXXYAXDY

SEQ ID NO: 2368 - protein, 17 aa, synthetic construct
  REGION 1..17: note = Description of Artificial Sequence: Synthetic peptide
  REGION 1..17: note = Synthetic Construct
  MOD_RES 1: note = Arg or Lys
  MOD_RES 4: note = Gln or Lys
  MOD_RES 7: note = Val or Leu
  MOD_RES 8: note = His, Asp, or Tyr
  MOD_RES 9: note = Ile, Asn, or Ser
  MOD_RES 10: note = Ser or absent
  MOD_RES 11: note = Asp or Asn
  MOD_RES 12: note = Gly or Gln
  MOD_RES 13: note = Asn, Ile, or Lys
  MOD_RES 14: note = Thr or Ser
  MOD_RES 15: note = Tyr or Phe
  MOD_RES 17: note = Gln, His, Tyr, Asn, or Ala
XSSXSLXXXXXXXXXLX

SEQ ID NO: 2369 - protein, 11 aa, synthetic construct
  REGION 1..11: note = Description of Artificial Sequence: Synthetic peptide
  REGION 1..11: note = Synthetic Construct
  MOD_RES 1: note = Arg, Lys, or Ser
  MOD_RES 4: note = Glu or Gln
  MOD_RES 5: note = Asn, Asp, or Gly
  MOD_RES 7: note = Tyr or Ser
  MOD_RES 8: note = Ser or Asn
  MOD_RES 9: note = Asn, Arg, or Tyr
  MOD_RES 11: note = Ala or Asn
XASXXIXXXLX

SEQ ID NO: 2370-2372 - skipped (3 entries)

SEQ ID NO: 2373 - protein, 159 aa, Homo sapiens
SGAHNTTVFQGVAGQSLQVSCPYDSMKHWGRRKAWCRQLGEKGPCQRVVSTHNLWLLSFLRRWNGSTAITDDTLGGTLTITLRNLQPHDAGLYQCQSLHGSEADTLRKVLVEVLADPLDHRDAGDLWFPGESESFEDAHVEHSISRSLLEGEIPFPPTS

SEQ ID NO: 2374 - protein, 10 aa, Homo sapiens
DLWFPGESES

SEQ ID NO: 2375 - protein, 9 aa, Homo sapiens
DLWFPGESE

SEQ ID NO: 2376 - protein, 5 aa, Homo sapiens
DLWFP

SEQ ID NO: 2377 - protein, 217 aa, synthetic construct
  REGION 1..217: note = Description of Artificial Sequence: Synthetic polypeptide
  REGION 1..217: note = Synthetic Construct
APELLGGPSVFLFPPKPKDTLMISRTPEVTCVVVDVSHEDPEVKFNWYVDGVEVHNAKTKPREEQYNSTYRVVSVLTVLHQDWLNGKEYKCKVSNKALPAPIEKTISKAKGQPREPQVYTLPPSRDELTKNQVSLTCLVKGFYPSDIAVEWESWGFVWSTYKTTPPVLDSDGSFFLYSKLTVPKSNWQQGFVFSCSVMHEALHNHYTQKSLSLSPGK

SEQ ID NO: 2378 - protein, 217 aa, synthetic construct
  REGION 1..217: note = Description of Artificial Sequence: Synthetic polypeptide
  REGION 1..217: note = Synthetic Construct
APELLGGPSVFLFPPKPKDTLMISRTPEVTCVVVDVSHEDPEVKFNWYVDGVEVHNAKTKPREEQYNSTYRVVSVLTVLHQDWLNGKEYKCKVSNKALPAPIEKTISKAKGQPREPQVYTLPPSRDELTKNQVSLTCLVKGFYPSDIAVEWESWGHVWSTYKTTPPVLDSDGSFFLYSKLTVPKSNWQQGYVFSCSVMHEALHNHYTQKSLSLSPGK

SEQ ID NO: 2379 - protein, 217 aa, synthetic construct
  REGION 1..217: note = Description of Artificial Sequence: Synthetic polypeptide
  REGION 1..217: note = Synthetic Construct
APELLGGPSVFLFPPKPKDTLMISRTPEVTCVVVDVSHEDPEVKFNWYVDGVEVHNAKTKPREEQYNSTYRVVSVLTVLHQDWLNGKEYKCKVSNKALPAPIEKTISKAKGQPREPQVYTLPPSRDELTKNQVSLTCLVKGFYPSDIAVEWESLGHVWVEQKTTPPVLDSDGSFFLYSKLTVPKSTWQQGWVFSCSVMHEALHNHYTQKSLSLSPGK

SEQ ID NO: 2380 - protein, 217 aa, synthetic construct
  REGION 1..217: note = Description of Artificial Sequence: Synthetic polypeptide
  REGION 1..217: note = Synthetic Construct
APELLGGPSVFLFPPKPKDTLMISRTPEVTCVVVDVSHEDPEVKFNWYVDGVEVHNAKTKPREEQYNSTYRVVSVLTVLHQDWLNGKEYKCKVSNKALPAPIEKTISKAKGQPREPQVYTLPPSRDELTKNQVSLTCLVKGFYPSDIAVEWESLGHVWVGVKTTPPVLDSDGSFFLYSKLTVPKSTWQQGWVFSCSVMHEALHNHYTQKSLSLSPGK

SEQ ID NO: 2381 - protein, 217 aa, synthetic construct
  REGION 1..217: note = Description of Artificial Sequence: Synthetic polypeptide
  REGION 1..217: note = Synthetic Construct
APELLGGPSVFLFPPKPKDTLMISRTPEVTCVVVDVSHEDPEVKFNWYVDGVEVHNAKTKPREEQYNSTYRVVSVLTVLHQDWLNGKEYKCKVSNKALPAPIEKTISKAKGQPREPQVYTLPPSRDELTKNQVSLTCLVKGFYPSDIAVEWESLGHVWVHTKTTPPVLDSDGSFFLYSKLTVPKSTWQQGWVFSCSVMHEALHNHYTQKSLSLSPGK

SEQ ID NO: 2382 - protein, 217 aa, synthetic construct
  REGION 1..217: note = Description of Artificial Sequence: Synthetic polypeptide
  REGION 1..217: note = Synthetic Construct
APELLGGPSVFLFPPKPKDTLMISRTPEVTCVVVDVSHEDPEVKFNWYVDGVEVHNAKTKPREEQYNSTYRVVSVLTVLHQDWLNGKEYKCKVSNKALPAPIEKTISKAKGQPREPQVYTLPPSRDELTKNQVSLTCLVKGFYPSDIAVEWESWGTVWGTYKTTPPVLDSDGSFFLYSKLTVPKSNWQQGYVFSCSVMHEALHNHYTQKSLSLSPGK

SEQ ID NO: 2383 - protein, 217 aa, synthetic construct
  REGION 1..217: note = Description of Artificial Sequence: Synthetic polypeptide
  REGION 1..217: note = Synthetic Construct
APELLGGPSVFLFPPKPKDTLMISRTPEVTCVVVDVSHEDPEVKFNWYVDGVEVHNAKTKPREEQYNSTYRVVSVLTVLHQDWLNGKEYKCKVSNKALPAPIEKTISKAKGQPREPQVYTLPPSRDELTKNQVSLTCLVKGFYPSDIAVEWESLGHVWVGTKTTPPVLDSDGSFFLYSKLTVPKSTWQQGWVFSCSVMHEALHNHYTQKSLSLSPGK

SEQ ID NO: 2384 - protein, 217 aa, synthetic construct
  REGION 1..217: note = Description of Artificial Sequence: Synthetic polypeptide
  REGION 1..217: note = Synthetic Construct
APELLGGPSVFLFPPKPKDTLMISRTPEVTCVVVDVSHEDPEVKFNWYVDGVEVHNAKTKPREEQYNSTYRVVSVLTVLHQDWLNGKEYKCKVSNKALPAPIEKTISKAKGQPREPQVYTLPPSRDELTKNQVSLTCLVKGFYPSDIAVEWESFGTEWSSYKTTPPVLDSDGSFFLYSKLTVSKEEWQQGFVFSCSVMHEALHNHYTQKSLSLSPGK

SEQ ID NO: 2385 - protein, 217 aa, synthetic construct
  REGION 1..217: note = Description of Artificial Sequence: Synthetic polypeptide
  REGION 1..217: note = Synthetic Construct
APELLGGPSVFLFPPKPKDTLMISRTPEVTCVVVDVSHEDPEVKFNWYVDGVEVHNAKTKPREEQYNSTYRVVSVLTVLHQDWLNGKEYKCKVSNKALPAPIEKTISKAKGQPREPQVYTLPPSRDELTKNQVSLTCLVKGFYPSDIAVEWESYGTEWANYKTTPPVLDSDGSFFLYSKLTVSKSEWQQGFVFSCSVMHEALHNHYTQKSLSLSPGK

SEQ ID NO: 2386 - protein, 217 aa, synthetic construct
  REGION 1..217: note = Description of Artificial Sequence: Synthetic polypeptide
  REGION 1..217: note = Synthetic Construct
APELLGGPSVFLFPPKPKDTLMISRTPEVTCVVVDVSHEDPEVKFNWYVDGVEVHNAKTKPREEQYNSTYRVVSVLTVLHQDWLNGKEYKCKVSNKALPAPIEKTISKAKGQPREPQVYTLPPSRDELTKNQVSLTCLVKGFYPSDIAVEWESFGTEWSNYKTTPPVLDSDGSFFLYSKLTVSKEEWQQGFVFSCSVMHEALHNHYTQKSLSLSPGK

SEQ ID NO: 2387 - protein, 217 aa, synthetic construct
  REGION 1..217: note = Description of Artificial Sequence: Synthetic polypeptide
  REGION 1..217: note = Synthetic Construct
APELLGGPSVFLFPPKPKDTLMISRTPEVTCVVVDVSHEDPEVKFNWYVDGVEVHNAKTKPREEQYNSTYRVVSVLTVLHQDWLNGKEYKCKVSNKALPAPIEKTISKAKGQPREPQVYTLPPSRDELTKNQVSLTCLVKGFYPSDIAVEWESYGTEWSSYKTTPPVLDSDGSFFLYSKLTVSKSEWQQGFVFSCSVMHEALHNHYTQKSLSLSPGK

SEQ ID NO: 2388 - protein, 217 aa, synthetic construct
  REGION 1..217: note = Description of Artificial Sequence: Synthetic polypeptide
  REGION 1..217: note = Synthetic Construct
APELLGGPSVFLFPPKPKDTLMISRTPEVTCVVVDVSHEDPEVKFNWYVDGVEVHNAKTKPREEQYNSTYRVVSVLTVLHQDWLNGKEYKCKVSNKALPAPIEKTISKAKGQPREPQVYTLPPSRDELTKNQVSLTCLVKGFYPSDIAVEWESYGTEWVNYKTTPPVLDSDGSFFLYSKLTVSKEEWQQGFVFSCSVMHEALHNHYTQKSLSLSPGK

SEQ ID NO: 2389 - protein, 217 aa, synthetic construct; identical to SEQ ID NO: 2187
  REGION 1..217: note = Description of Artificial Sequence: Synthetic polypeptide
  REGION 1..217: note = Synthetic Construct

SEQ ID NO: 2390 - protein, 217 aa, synthetic construct
  REGION 1..217: note = Description of Artificial Sequence: Synthetic polypeptide
  REGION 1..217: note = Synthetic Construct
APELLGGPSVFLFPPKPKDTLMISRTPEVTCVVVDVSHEDPEVKFNWYVDGVEVHNAKTKPREEQYNSTYRVVSVLTVLHQDWLNGKEYKCKVSNKALPAPIEKTISKAKGQPREPQVYTLPPSRDELTKNQVSLTCLVKGFYPSDIAVEWESFGTEWVNYKTTPPVLDSDGSFFLYSKLTVSKEEWQQGFVFSCSVMHEALHNHYTQKSLSLSPGK

SEQ ID NO: 2391 - protein, 217 aa, synthetic construct
  REGION 1..217: note = Description of Artificial Sequence: Synthetic polypeptide
  REGION 1..217: note = Synthetic Construct
APEAAGGPSVFLFPPKPKDTLMISRTPEVTCVVVDVSHEDPEVKFNWYVDGVEVHNAKTKPREEQYNSTYRVVSVLTVLHQDWLNGKEYKCKVSNKALGAPIEKTISKAKGQPREPQVYTLPPSRDELTKNQVSLWCLVKGFYPSDIAVWWESYGTEWSSYKTTPPVLDSDGSFFLYSKLTVTKEEWQQGFVFSCSVMHEALHNHYTQKSLSLSPGK

SEQ ID NO: 2392 - protein, 217 aa, synthetic construct
  REGION 1..217: note = Description of Artificial Sequence: Synthetic polypeptide
  REGION 1..217: note = Synthetic Construct
APEAAGGPSVFLFPPKPKDTLYITREPEVTCVVVDVSHEDPEVKFNWYVDGVEVHNAKTKPREEQYNSTYRVVSVLTVLHQDWLNGKEYKCKVSNKALGAPIEKTISKAKGQPREPQVYTLPPSRDELTKNQVSLWCLVKGFYPSDIAVWWESYGTEWSSYKTTPPVLDSDGSFFLYSKLTVTKEEWQQGFVFSCSVMHEALHNHYTQKSLSLSPGK

SEQ ID NO: 2393 - protein, 217 aa, synthetic construct
  REGION 1..217: note = Description of Artificial Sequence: Synthetic polypeptide
  REGION 1..217: note = Synthetic Construct
APEAAGGPSVFLFPPKPKDTLMISRTPEVTCVVVDVSHEDPEVKFNWYVDGVEVHNAKTKPREEQYNSTYRVVSVLTVLHQDWLNGKEYKCKVSNKALGAPIEKTISKAKGQPREPQVYTLPPSRDELTKNQVSLSCAVKGFYPSDIAVWWESYGTEWSSYKTTPPVLDSDGSFFLVSKLTVTKEEWQQGFVFSCSVMHEALHNHYTQKSLSLSPGK

SEQ ID NO: 2394 - protein, 217 aa, synthetic construct
  REGION 1..217: note = Description of Artificial Sequence: Synthetic polypeptide
  REGION 1..217: note = Synthetic Construct
APEAAGGPSVFLFPPKPKDTLYITREPEVTCVVVDVSHEDPEVKFNWYVDGVEVHNAKTKPREEQYNSTYRVVSVLTVLHQDWLNGKEYKCKVSNKALGAPIEKTISKAKGQPREPQVYTLPPSRDELTKNQVSLSCAVKGFYPSDIAVWWESYGTEWSSYKTTPPVLDSDGSFFLVSKLTVTKEEWQQGFVFSCSVMHEALHNHYTQKSLSLSPGK

SEQ ID NO: 2395 - protein, 217 aa, synthetic construct
  REGION 1..217: note = Description of Artificial Sequence: Synthetic polypeptide
  REGION 1..217: note = Synthetic Construct
APELLGGPSVFLFPPKPKDTLMISRTPEVTCVVVDVSHEDPEVKFNWYVDGVEVHNAKTKPREEQYNSTYRVVSVLTVLHQDWLNGKEYKCKVSNKALPAPIEKTISKAKGQPREPQVYTLPPSRDELTKNQVSLWCLVKGFYPSDIAVEWESFGTEWSSYKTTPPVLDSDGSFFLYSKLTVSKEEWQQGFVFSCSVMHEALHNHYTQKSLSLSPGK

SEQ ID NO: 2396 - protein, 217 aa, synthetic construct
  REGION 1..217: note = Description of Artificial Sequence: Synthetic polypeptide
  REGION 1..217: note = Synthetic Construct
APEAAGGPSVFLFPPKPKDTLMISRTPEVTCVVVDVSHEDPEVKFNWYVDGVEVHNAKTKPREEQYNSTYRVVSVLTVLHQDWLNGKEYKCKVSNKALPAPIEKTISKAKGQPREPQVYTLPPSRDELTKNQVSLWCLVKGFYPSDIAVEWESFGTEWSSYKTTPPVLDSDGSFFLYSKLTVSKEEWQQGFVFSCSVMHEALHNHYTQKSLSLSPGK

SEQ ID NO: 2397 - protein, 217 aa, synthetic construct
  REGION 1..217: note = Description of Artificial Sequence: Synthetic polypeptide
  REGION 1..217: note = Synthetic Construct
APEAAGGPSVFLFPPKPKDTLMISRTPEVTCVVVDVSHEDPEVKFNWYVDGVEVHNAKTKPREEQYNSTYRVVSVLTVLHQDWLNGKEYKCKVSNKALGAPIEKTISKAKGQPREPQVYTLPPSRDELTKNQVSLWCLVKGFYPSDIAVEWESFGTEWSSYKTTPPVLDSDGSFFLYSKLTVSKEEWQQGFVFSCSVMHEALHNHYTQKSLSLSPGK

SEQ ID NO: 2398 - protein, 217 aa, synthetic construct
  REGION 1..217: note = Description of Artificial Sequence: Synthetic polypeptide
  REGION 1..217: note = Synthetic Construct
APELLGGPSVFLFPPKPKDTLYITREPEVTCVVVDVSHEDPEVKFNWYVDGVEVHNAKTKPREEQYNSTYRVVSVLTVLHQDWLNGKEYKCKVSNKALPAPIEKTISKAKGQPREPQVYTLPPSRDELTKNQVSLWCLVKGFYPSDIAVEWESFGTEWSSYKTTPPVLDSDGSFFLYSKLTVSKEEWQQGFVFSCSVMHEALHNHYTQKSLSLSPGK

SEQ ID NO: 2399 - protein, 217 aa, synthetic construct
  REGION 1..217: note = Description of Artificial Sequence: Synthetic polypeptide
  REGION 1..217: note = Synthetic Construct
APEAAGGPSVFLFPPKPKDTLYITREPEVTCVVVDVSHEDPEVKFNWYVDGVEVHNAKTKPREEQYNSTYRVVSVLTVLHQDWLNGKEYKCKVSNKALPAPIEKTISKAKGQPREPQVYTLPPSRDELTKNQVSLWCLVKGFYPSDIAVEWESFGTEWSSYKTTPPVLDSDGSFFLYSKLTVSKEEWQQGFVFSCSVMHEALHNHYTQKSLSLSPGK

SEQ ID NO: 2400 - protein, 217 aa, synthetic construct
  REGION 1..217: note = Description of Artificial Sequence: Synthetic polypeptide
  REGION 1..217: note = Synthetic Construct
APEAAGGPSVFLFPPKPKDTLYITREPEVTCVVVDVSHEDPEVKFNWYVDGVEVHNAKTKPREEQYNSTYRVVSVLTVLHQDWLNGKEYKCKVSNKALGAPIEKTISKAKGQPREPQVYTLPPSRDELTKNQVSLWCLVKGFYPSDIAVEWESFGTEWSSYKTTPPVLDSDGSFFLYSKLTVSKEEWQQGFVFSCSVMHEALHNHYTQKSLSLSPGK

SEQ ID NO: 2401 - protein, 217 aa, synthetic construct
  REGION 1..217: note = Description of Artificial Sequence: Synthetic polypeptide
  REGION 1..217: note = Synthetic Construct
APELLGGPSVFLFPPKPKDTLMISRTPEVTCVVVDVSHEDPEVKFNWYVDGVEVHNAKTKPREEQYNSTYRVVSVLTVLHQDWLNGKEYKCKVSNKALPAPIEKTISKAKGQPREPQVYTLPPSRDELTKNQVSLSCAVKGFYPSDIAVEWESFGTEWSSYKTTPPVLDSDGSFFLVSKLTVSKEEWQQGFVFSCSVMHEALHNHYTQKSLSLSPGK

SEQ ID NO: 2402 - protein, 217 aa, synthetic construct
  REGION 1..217: note = Description of Artificial Sequence: Synthetic polypeptide
  REGION 1..217: note = Synthetic Construct
APEAAGGPSVFLFPPKPKDTLMISRTPEVTCVVVDVSHEDPEVKFNWYVDGVEVHNAKTKPREEQYNSTYRVVSVLTVLHQDWLNGKEYKCKVSNKALPAPIEKTISKAKGQPREPQVYTLPPSRDELTKNQVSLSCAVKGFYPSDIAVEWESFGTEWSSYKTTPPVLDSDGSFFLVSKLTVSKEEWQQGFVFSCSVMHEALHNHYTQKSLSLSPGK

SEQ ID NO: 2403 - protein, 217 aa, synthetic construct
  REGION 1..217: note = Description of Artificial Sequence: Synthetic polypeptide
  REGION 1..217: note = Synthetic Construct
APEAAGGPSVFLFPPKPKDTLMISRTPEVTCVVVDVSHEDPEVKFNWYVDGVEVHNAKTKPREEQYNSTYRVVSVLTVLHQDWLNGKEYKCKVSNKALGAPIEKTISKAKGQPREPQVYTLPPSRDELTKNQVSLSCAVKGFYPSDIAVEWESFGTEWSSYKTTPPVLDSDGSFFLVSKLTVSKEEWQQGFVFSCSVMHEALHNHYTQKSLSLSPGK

SEQ ID NO: 2404 - protein, 217 aa, synthetic construct
  REGION 1..217: note = Description of Artificial Sequence: Synthetic polypeptide
  REGION 1..217: note = Synthetic Construct
APELLGGPSVFLFPPKPKDTLYITREPEVTCVVVDVSHEDPEVKFNWYVDGVEVHNAKTKPREEQYNSTYRVVSVLTVLHQDWLNGKEYKCKVSNKALPAPIEKTISKAKGQPREPQVYTLPPSRDELTKNQVSLSCAVKGFYPSDIAVEWESFGTEWSSYKTTPPVLDSDGSFFLVSKLTVSKEEWQQGFVFSCSVMHEALHNHYTQKSLSLSPGK

SEQ ID NO: 2405 - protein, 217 aa, synthetic construct
  REGION 1..217: note = Description of Artificial Sequence: Synthetic polypeptide
  REGION 1..217: note = Synthetic Construct
APEAAGGPSVFLFPPKPKDTLYITREPEVTCVVVDVSHEDPEVKFNWYVDGVEVHNAKTKPREEQYNSTYRVVSVLTVLHQDWLNGKEYKCKVSNKALPAPIEKTISKAKGQPREPQVYTLPPSRDELTKNQVSLSCAVKGFYPSDIAVEWESFGTEWSSYKTTPPVLDSDGSFFLVSKLTVSKEEWQQGFVFSCSVMHEALHNHYTQKSLSLSPGK

SEQ ID NO: 2406 - protein, 217 aa, synthetic construct
  REGION 1..217: note = Description of Artificial Sequence: Synthetic polypeptide
  REGION 1..217: note = Synthetic Construct
APEAAGGPSVFLFPPKPKDTLYITREPEVTCVVVDVSHEDPEVKFNWYVDGVEVHNAKTKPREEQYNSTYRVVSVLTVLHQDWLNGKEYKCKVSNKALGAPIEKTISKAKGQPREPQVYTLPPSRDELTKNQVSLSCAVKGFYPSDIAVEWESFGTEWSSYKTTPPVLDSDGSFFLVSKLTVSKEEWQQGFVFSCSVMHEALHNHYTQKSLSLSPGK

SEQ ID NO: 2407 - protein, 217 aa, synthetic construct
  REGION 1..217: note = Description of Artificial Sequence: Synthetic polypeptide
  REGION 1..217: note = Synthetic Construct
APELLGGPSVFLFPPKPKDTLMISRTPEVTCVVVDVSHEDPEVKFNWYVDGVEVHNAKTKPREEQYNSTYRVVSVLTVLHQDWLNGKEYKCKVSNKALPAPIEKTISKAKGQPREPQVYTLPPSRDELTKNQVSLWCLVKGFYPSDIAVEWESYGTEWANYKTTPPVLDSDGSFFLYSKLTVSKSEWQQGFVFSCSVMHEALHNHYTQKSLSLSPGK

SEQ ID NO: 2408 - protein, 217 aa, synthetic construct
  REGION 1..217: note = Description of Artificial Sequence: Synthetic polypeptide
  REGION 1..217: note = Synthetic Construct
APEAAGGPSVFLFPPKPKDTLMISRTPEVTCVVVDVSHEDPEVKFNWYVDGVEVHNAKTKPREEQYNSTYRVVSVLTVLHQDWLNGKEYKCKVSNKALPAPIEKTISKAKGQPREPQVYTLPPSRDELTKNQVSLWCLVKGFYPSDIAVEWESYGTEWANYKTTPPVLDSDGSFFLYSKLTVSKSEWQQGFVFSCSVMHEALHNHYTQKSLSLSPGK

SEQ ID NO: 2409 - protein, 217 aa, synthetic construct
  REGION 1..217: note = Description of Artificial Sequence: Synthetic polypeptide
  REGION 1..217: note = Synthetic Construct
APEAAGGPSVFLFPPKPKDTLMISRTPEVTCVVVDVSHEDPEVKFNWYVDGVEVHNAKTKPREEQYNSTYRVVSVLTVLHQDWLNGKEYKCKVSNKALGAPIEKTISKAKGQPREPQVYTLPPSRDELTKNQVSLWCLVKGFYPSDIAVEWESYGTEWANYKTTPPVLDSDGSFFLYSKLTVSKSEWQQGFVFSCSVMHEALHNHYTQKSLSLSPGK

SEQ ID NO: 2410 - protein, 217 aa, synthetic construct
  REGION 1..217: note = Description of Artificial Sequence: Synthetic polypeptide
  REGION 1..217: note = Synthetic Construct
APELLGGPSVFLFPPKPKDTLYITREPEVTCVVVDVSHEDPEVKFNWYVDGVEVHNAKTKPREEQYNSTYRVVSVLTVLHQDWLNGKEYKCKVSNKALPAPIEKTISKAKGQPREPQVYTLPPSRDELTKNQVSLWCLVKGFYPSDIAVEWESYGTEWANYKTTPPVLDSDGSFFLYSKLTVSKSEWQQGFVFSCSVMHEALHNHYTQKSLSLSPGK

SEQ ID NO: 2411 - protein, 217 aa, synthetic construct
  REGION 1..217: note = Description of Artificial Sequence: Synthetic polypeptide
  REGION 1..217: note = Synthetic Construct
APEAAGGPSVFLFPPKPKDTLYITREPEVTCVVVDVSHEDPEVKFNWYVDGVEVHNAKTKPREEQYNSTYRVVSVLTVLHQDWLNGKEYKCKVSNKALPAPIEKTISKAKGQPREPQVYTLPPSRDELTKNQVSLWCLVKGFYPSDIAVEWESYGTEWANYKTTPPVLDSDGSFFLYSKLTVSKSEWQQGFVFSCSVMHEALHNHYTQKSLSLSPGK

SEQ ID NO: 2412 - protein, 217 aa, synthetic construct
  REGION 1..217: note = Description of Artificial Sequence: Synthetic polypeptide
  REGION 1..217: note = Synthetic Construct
APEAAGGPSVFLFPPKPKDTLYITREPEVTCVVVDVSHEDPEVKFNWYVDGVEVHNAKTKPREEQYNSTYRVVSVLTVLHQDWLNGKEYKCKVSNKALGAPIEKTISKAKGQPREPQVYTLPPSRDELTKNQVSLWCLVKGFYPSDIAVEWESYGTEWANYKTTPPVLDSDGSFFLYSKLTVSKSEWQQGFVFSCSVMHEALHNHYTQKSLSLSPGK

SEQ ID NO: 2413 - protein, 217 aa, synthetic construct
  REGION 1..217: note = Description of Artificial Sequence: Synthetic polypeptide
  REGION 1..217: note = Synthetic Construct
APELLGGPSVFLFPPKPKDTLMISRTPEVTCVVVDVSHEDPEVKFNWYVDGVEVHNAKTKPREEQYNSTYRVVSVLTVLHQDWLNGKEYKCKVSNKALPAPIEKTISKAKGQPREPQVYTLPPSRDELTKNQVSLSCAVKGFYPSDIAVEWESYGTEWANYKTTPPVLDSDGSFFLVSKLTVSKSEWQQGFVFSCSVMHEALHNHYTQKSLSLSPGK

SEQ ID NO: 2414 - protein, 217 aa, synthetic construct
  REGION 1..217: note = Description of Artificial Sequence: Synthetic polypeptide
  REGION 1..217: note = Synthetic Construct
APEAAGGPSVFLFPPKPKDTLMISRTPEVTCVVVDVSHEDPEVKFNWYVDGVEVHNAKTKPREEQYNSTYRVVSVLTVLHQDWLNGKEYKCKVSNKALPAPIEKTISKAKGQPREPQVYTLPPSRDELTKNQVSLSCAVKGFYPSDIAVEWESYGTEWANYKTTPPVLDSDGSFFLVSKLTVSKSEWQQGFVFSCSVMHEALHNHYTQKSLSLSPGK

SEQ ID NO: 2415 - protein, 217 aa, synthetic construct
  REGION 1..217: note = Description of Artificial Sequence: Synthetic polypeptide
  REGION 1..217: note = Synthetic Construct
APEAAGGPSVFLFPPKPKDTLMISRTPEVTCVVVDVSHEDPEVKFNWYVDGVEVHNAKTKPREEQYNSTYRVVSVLTVLHQDWLNGKEYKCKVSNKALGAPIEKTISKAKGQPREPQVYTLPPSRDELTKNQVSLSCAVKGFYPSDIAVEWESYGTEWANYKTTPPVLDSDGSFFLVSKLTVSKSEWQQGFVFSCSVMHEALHNHYTQKSLSLSPGK

SEQ ID NO: 2416 - protein, 217 aa, synthetic construct
  REGION 1..217: note = Description of Artificial Sequence: Synthetic polypeptide
  REGION 1..217: note = Synthetic Construct
APELLGGPSVFLFPPKPKDTLYITREPEVTCVVVDVSHEDPEVKFNWYVDGVEVHNAKTKPREEQYNSTYRVVSVLTVLHQDWLNGKEYKCKVSNKALPAPIEKTISKAKGQPREPQVYTLPPSRDELTKNQVSLSCAVKGFYPSDIAVEWESYGTEWANYKTTPPVLDSDGSFFLVSKLTVSKSEWQQGFVFSCSVMHEALHNHYTQKSLSLSPGK

SEQ ID NO: 2417 - protein, 217 aa, synthetic construct
  REGION 1..217: note = Description of Artificial Sequence: Synthetic polypeptide
  REGION 1..217: note = Synthetic Construct
APEAAGGPSVFLFPPKPKDTLYITREPEVTCVVVDVSHEDPEVKFNWYVDGVEVHNAKTKPREEQYNSTYRVVSVLTVLHQDWLNGKEYKCKVSNKALPAPIEKTISKAKGQPREPQVYTLPPSRDELTKNQVSLSCAVKGFYPSDIAVEWESYGTEWANYKTTPPVLDSDGSFFLVSKLTVSKSEWQQGFVFSCSVMHEALHNHYTQKSLSLSPGK

SEQ ID NO: 2418 - protein, 217 aa, synthetic construct
  REGION 1..217: note = Description of Artificial Sequence: Synthetic polypeptide
  REGION 1..217: note = Synthetic Construct
APEAAGGPSVFLFPPKPKDTLYITREPEVTCVVVDVSHEDPEVKFNWYVDGVEVHNAKTKPREEQYNSTYRVVSVLTVLHQDWLNGKEYKCKVSNKALGAPIEKTISKAKGQPREPQVYTLPPSRDELTKNQVSLSCAVKGFYPSDIAVEWESYGTEWANYKTTPPVLDSDGSFFLVSKLTVSKSEWQQGFVFSCSVMHEALHNHYTQKSLSLSPGK

SEQ ID NO: 2419 - protein, 217 aa, synthetic construct
  REGION 1..217: note = Description of Artificial Sequence: Synthetic polypeptide
  REGION 1..217: note = Synthetic Construct
APELLGGPSVFLFPPKPKDTLMISRTPEVTCVVVDVSHEDPEVKFNWYVDGVEVHNAKTKPREEQYNSTYRVVSVLTVLHQDWLNGKEYKCKVSNKALPAPIEKTISKAKGQPREPQVYTLPPSRDELTKNQVSLWCLVKGFYPSDIAVEWESFGTEWSNYKTTPPVLDSDGSFFLYSKLTVSKEEWQQGFVFSCSVMHEALHNHYTQKSLSLSPGK

SEQ ID NO: 2420 - protein, 217 aa, synthetic construct
  REGION 1..217: note = Description of Artificial Sequence: Synthetic polypeptide
  REGION 1..217: note = Synthetic Construct
APEAAGGPSVFLFPPKPKDTLMISRTPEVTCVVVDVSHEDPEVKFNWYVDGVEVHNAKTKPREEQYNSTYRVVSVLTVLHQDWLNGKEYKCKVSNKALPAPIEKTISKAKGQPREPQVYTLPPSRDELTKNQVSLWCLVKGFYPSDIAVEWESFGTEWSNYKTTPPVLDSDGSFFLYSKLTVSKEEWQQGFVFSCSVMHEALHNHYTQKSLSLSPGK

SEQ ID NO: 2421 - protein, 217 aa, synthetic construct
  REGION 1..217: note = Description of Artificial Sequence: Synthetic polypeptide
  REGION 1..217: note = Synthetic Construct
APEAAGGPSVFLFPPKPKDTLMISRTPEVTCVVVDVSHEDPEVKFNWYVDGVEVHNAKTKPREEQYNSTYRVVSVLTVLHQDWLNGKEYKCKVSNKALGAPIEKTISKAKGQPREPQVYTLPPSRDELTKNQVSLWCLVKGFYPSDIAVEWESFGTEWSNYKTTPPVLDSDGSFFLYSKLTVSKEEWQQGFVFSCSVMHEALHNHYTQKSLSLSPGK

SEQ ID NO: 2422 - protein, 217 aa, synthetic construct
  REGION 1..217: note = Description of Artificial Sequence: Synthetic polypeptide
  REGION 1..217: note = Synthetic Construct
APELLGGPSVFLFPPKPKDTLYITREPEVTCVVVDVSHEDPEVKFNWYVDGVEVHNAKTKPREEQYNSTYRVVSVLTVLHQDWLNGKEYKCKVSNKALPAPIEKTISKAKGQPREPQVYTLPPSRDELTKNQVSLWCLVKGFYPSDIAVEWESFGTEWSNYKTTPPVLDSDGSFFLYSKLTVSKEEWQQGFVFSCSVMHEALHNHYTQKSLSLSPGK

SEQ ID NO: 2423 - protein, 217 aa, synthetic construct
  REGION 1..217: note = Description of Artificial Sequence: Synthetic polypeptide
  REGION 1..217: note = Synthetic Construct
APEAAGGPSVFLFPPKPKDTLYITREPEVTCVVVDVSHEDPEVKFNWYVDGVEVHNAKTKPREEQYNSTYRVVSVLTVLHQDWLNGKEYKCKVSNKALPAPIEKTISKAKGQPREPQVYTLPPSRDELTKNQVSLWCLVKGFYPSDIAVEWESFGTEWSNYKTTPPVLDSDGSFFLYSKLTVSKEEWQQGFVFSCSVMHEALHNHYTQKSLSLSPGK

SEQ ID NO: 2424 - protein, 217 aa, synthetic construct
  REGION 1..217: note = Description of Artificial Sequence: Synthetic polypeptide
  REGION 1..217: note = Synthetic Construct
APEAAGGPSVFLFPPKPKDTLYITREPEVTCVVVDVSHEDPEVKFNWYVDGVEVHNAKTKPREEQYNSTYRVVSVLTVLHQDWLNGKEYKCKVSNKALGAPIEKTISKAKGQPREPQVYTLPPSRDELTKNQVSLWCLVKGFYPSDIAVEWESFGTEWSNYKTTPPVLDSDGSFFLYSKLTVSKEEWQQGFVFSCSVMHEALHNHYTQKSLSLSPGK

SEQ ID NO: 2425 - protein, 217 aa, synthetic construct
  REGION 1..217: note = Description of Artificial Sequence: Synthetic polypeptide
  REGION 1..217: note = Synthetic Construct
APELLGGPSVFLFPPKPKDTLMISRTPEVTCVVVDVSHEDPEVKFNWYVDGVEVHNAKTKPREEQYNSTYRVVSVLTVLHQDWLNGKEYKCKVSNKALPAPIEKTISKAKGQPREPQVYTLPPSRDELTKNQVSLSCAVKGFYPSDIAVEWESFGTEWSNYKTTPPVLDSDGSFFLVSKLTVSKEEWQQGFVFSCSVMHEALHNHYTQKSLSLSPGK

SEQ ID NO: 2426 - protein, 217 aa, synthetic construct
  REGION 1..217: note = Description of Artificial Sequence: Synthetic polypeptide
  REGION 1..217: note = Synthetic Construct
APEAAGGPSVFLFPPKPKDTLMISRTPEVTCVVVDVSHEDPEVKFNWYVDGVEVHNAKTKPREEQYNSTYRVVSVLTVLHQDWLNGKEYKCKVSNKALPAPIEKTISKAKGQPREPQVYTLPPSRDELTKNQVSLSCAVKGFYPSDIAVEWESFGTEWSNYKTTPPVLDSDGSFFLVSKLTVSKEEWQQGFVFSCSVMHEALHNHYTQKSLSLSPGK

SEQ ID NO: 2427 - protein, 217 aa, synthetic construct
  REGION 1..217: note = Description of Artificial Sequence: Synthetic polypeptide
  REGION 1..217: note = Synthetic Construct
APEAAGGPSVFLFPPKPKDTLMISRTPEVTCVVVDVSHEDPEVKFNWYVDGVEVHNAKTKPREEQYNSTYRVVSVLTVLHQDWLNGKEYKCKVSNKALGAPIEKTISKAKGQPREPQVYTLPPSRDELTKNQVSLSCAVKGFYPSDIAVEWESFGTEWSNYKTTPPVLDSDGSFFLVSKLTVSKEEWQQGFVFSCSVMHEALHNHYTQKSLSLSPGK

SEQ ID NO: 2428 - protein, 217 aa, synthetic construct
  REGION 1..217: note = Description of Artificial Sequence: Synthetic polypeptide
  REGION 1..217: note = Synthetic Construct
APELLGGPSVFLFPPKPKDTLYITREPEVTCVVVDVSHEDPEVKFNWYVDGVEVHNAKTKPREEQYNSTYRVVSVLTVLHQDWLNGKEYKCKVSNKALPAPIEKTISKAKGQPREPQVYTLPPSRDELTKNQVSLSCAVKGFYPSDIAVEWESFGTEWSNYKTTPPVLDSDGSFFLVSKLTVSKEEWQQGFVFSCSVMHEALHNHYTQKSLSLSPGK

SEQ ID NO: 2429 - protein, 217 aa, synthetic construct
  REGION 1..217: note = Description of Artificial Sequence: Synthetic polypeptide
  REGION 1..217: note = Synthetic Construct
APEAAGGPSVFLFPPKPKDTLYITREPEVTCVVVDVSHEDPEVKFNWYVDGVEVHNAKTKPREEQYNSTYRVVSVLTVLHQDWLNGKEYKCKVSNKALPAPIEKTISKAKGQPREPQVYTLPPSRDELTKNQVSLSCAVKGFYPSDIAVEWESFGTEWSNYKTTPPVLDSDGSFFLVSKLTVSKEEWQQGFVFSCSVMHEALHNHYTQKSLSLSPGK

SEQ ID NO: 2430 - protein, 217 aa, synthetic construct
  REGION 1..217: note = Description of Artificial Sequence: Synthetic polypeptide
  REGION 1..217: note = Synthetic Construct
APEAAGGPSVFLFPPKPKDTLYITREPEVTCVVVDVSHEDPEVKFNWYVDGVEVHNAKTKPREEQYNSTYRVVSVLTVLHQDWLNGKEYKCKVSNKALGAPIEKTISKAKGQPREPQVYTLPPSRDELTKNQVSLSCAVKGFYPSDIAVEWESFGTEWSNYKTTPPVLDSDGSFFLVSKLTVSKEEWQQGFVFSCSVMHEALHNHYTQKSLSLSPGK

SEQ ID NO: 2431 - protein, 217 aa, synthetic construct
  REGION 1..217: note = Description of Artificial Sequence: Synthetic polypeptide
  REGION 1..217: note = Synthetic Construct
APELLGGPSVFLFPPKPKDTLMISRTPEVTCVVVDVSHEDPEVKFNWYVDGVEVHNAKTKPREEQYNSTYRVVSVLTVLHQDWLNGKEYKCKVSNKALPAPIEKTISKAKGQPREPQVYTLPPSRDELTKNQVSLTCLVKGFYPSDIAVEWESFGTEWSSYKTTPPVLDSDGSFFLYSKLTVTKEEWQQGFVFSCSVLHEALHSHYTQKSLSLSPGK

SEQ ID NO: 2432 - protein, 217 aa, synthetic construct
  REGION 1..217: note = Description of Artificial Sequence: Synthetic polypeptide
  REGION 1..217: note = Synthetic Construct
APELLGGPSVFLFPPKPKDTLMISRTPEVTCVVVDVSHEDPEVKFNWYVDGVEVHNAKTKPREEQYNSTYRVVSVLTVLHQDWLNGKEYKCKVSNKALPAPIEKTISKAKGQPREPQVYTLPPSRDELTKNQVSLWCLVKGFYPSDIAVEWESFGTEWSSYKTTPPVLDSDGSFFLYSKLTVTKEEWQQGFVFSCSVLHEALHSHYTQKSLSLSPGK

SEQ ID NO: 2433 - protein, 217 aa, synthetic construct
  REGION 1..217: note = Description of Artificial Sequence: Synthetic polypeptide
  REGION 1..217: note = Synthetic Construct
APEAAGGPSVFLFPPKPKDTLMISRTPEVTCVVVDVSHEDPEVKFNWYVDGVEVHNAKTKPREEQYNSTYRVVSVLTVLHQDWLNGKEYKCKVSNKALPAPIEKTISKAKGQPREPQVYTLPPSRDELTKNQVSLWCLVKGFYPSDIAVEWESFGTEWSSYKTTPPVLDSDGSFFLYSKLTVTKEEWQQGFVFSCSVLHEALHSHYTQKSLSLSPGK

SEQ ID NO: 2434 - protein, 217 aa, synthetic construct
  REGION 1..217: note = Description of Artificial Sequence: Synthetic polypeptide
  REGION 1..217: note = Synthetic Construct
APEAAGGPSVFLFPPKPKDTLMISRTPEVTCVVVDVSHEDPEVKFNWYVDGVEVHNAKTKPREEQYNSTYRVVSVLTVLHQDWLNGKEYKCKVSNKALGAPIEKTISKAKGQPREPQVYTLPPSRDELTKNQVSLWCLVKGFYPSDIAVEWESFGTEWSSYKTTPPVLDSDGSFFLYSKLTVTKEEWQQGFVFSCSVLHEALHSHYTQKSLSLSPGK

SEQ ID NO: 2435 - protein, 217 aa, synthetic construct
  REGION 1..217: note = Description of Artificial Sequence: Synthetic polypeptide
  REGION 1..217: note = Synthetic Construct
APELLGGPSVFLFPPKPKDTLMISRTPEVTCVVVDVSHEDPEVKFNWYVDGVEVHNAKTKPREEQYNSTYRVVSVLTVLHQDWLNGKEYKCKVSNKALPAPIEKTISKAKGQPREPQVYTLPPSRDELTKNQVSLSCAVKGFYPSDIAVEWESFGTEWSSYKTTPPVLDSDGSFFLVSKLTVTKEEWQQGFVFSCSVLHEALHSHYTQKSLSLSPGK

SEQ ID NO: 2436 - protein, 217 aa, synthetic construct
  REGION 1..217: note = Description of Artificial Sequence: Synthetic polypeptide
  REGION 1..217: note = Synthetic Construct
APEAAGGPSVFLFPPKPKDTLMISRTPEVTCVVVDVSHEDPEVKFNWYVDGVEVHNAKTKPREEQYNSTYRVVSVLTVLHQDWLNGKEYKCKVSNKALPAPIEKTISKAKGQPREPQVYTLPPSRDELTKNQVSLSCAVKGFYPSDIAVEWESFGTEWSSYKTTPPVLDSDGSFFLVSKLTVTKEEWQQGFVFSCSVLHEALHSHYTQKSLSLSPGK

SEQ ID NO: 2437 - protein, 217 aa, synthetic construct
  REGION 1..217: note = Description of Artificial Sequence: Synthetic polypeptide
  REGION 1..217: note = Synthetic Construct
APEAAGGPSVFLFPPKPKDTLMISRTPEVTCVVVDVSHEDPEVKFNWYVDGVEVHNAKTKPREEQYNSTYRVVSVLTVLHQDWLNGKEYKCKVSNKALGAPIEKTISKAKGQPREPQVYTLPPSRDELTKNQVSLSCAVKGFYPSDIAVEWESFGTEWSSYKTTPPVLDSDGSFFLVSKLTVTKEEWQQGFVFSCSVLHEALHSHYTQKSLSLSPGK

SEQ ID NO: 2438 - protein, 217 aa, synthetic construct
  REGION 1..217: note = Description of Artificial Sequence: Synthetic polypeptide
  REGION 1..217: note = Synthetic Construct
APELLGGPSVFLFPPKPKDTLMISRTPEVTCVVVDVSHEDPEVKFNWYVDGVEVHNAKTKPREEQYNSTYRVVSVLTVLHQDWLNGKEYKCKVSNKALPAPIEKTISKAKGQPREPQVYTLPPSRDELTKNQVSLTCLVKGFYPSDIAVEWESFGTEWSSYKTTPPVLDSDGSFFLYSKLTVSKEEWQQGFVFSCSVLHEALHSHYTQKSLSLSPGK

SEQ ID NO: 2439 - protein, 217 aa, synthetic construct
  REGION 1..217: note = Description of Artificial Sequence: Synthetic polypeptide
  REGION 1..217: note = Synthetic Construct
APELLGGPSVFLFPPKPKDTLMISRTPEVTCVVVDVSHEDPEVKFNWYVDGVEVHNAKTKPREEQYNSTYRVVSVLTVLHQDWLNGKEYKCKVSNKALPAPIEKTISKAKGQPREPQVYTLPPSRDELTKNQVSLWCLVKGFYPSDIAVEWESFGTEWSSYKTTPPVLDSDGSFFLYSKLTVSKEEWQQGFVFSCSVLHEALHSHYTQKSLSLSPGK

SEQ ID NO: 2440 - protein, 217 aa, synthetic construct
  REGION 1..217: note = Description of Artificial Sequence: Synthetic polypeptide
  REGION 1..217: note = Synthetic Construct
APEAAGGPSVFLFPPKPKDTLMISRTPEVTCVVVDVSHEDPEVKFNWYVDGVEVHNAKTKPREEQYNSTYRVVSVLTVLHQDWLNGKEYKCKVSNKALPAPIEKTISKAKGQPREPQVYTLPPSRDELTKNQVSLWCLVKGFYPSDIAVEWESFGTEWSSYKTTPPVLDSDGSFFLYSKLTVSKEEWQQGFVFSCSVLHEALHSHYTQKSLSLSPGK

SEQ ID NO: 2441 - protein, 217 aa, synthetic construct
  REGION 1..217: note = Description of Artificial Sequence: Synthetic polypeptide
  REGION 1..217: note = Synthetic Construct
APEAAGGPSVFLFPPKPKDTLMISRTPEVTCVVVDVSHEDPEVKFNWYVDGVEVHNAKTKPREEQYNSTYRVVSVLTVLHQDWLNGKEYKCKVSNKALGAPIEKTISKAKGQPREPQVYTLPPSRDELTKNQVSLWCLVKGFYPSDIAVEWESFGTEWSSYKTTPPVLDSDGSFFLYSKLTVSKEEWQQGFVFSCSVLHEALHSHYTQKSLSLSPGK

SEQ ID NO: 2442 - protein, 217 aa, synthetic construct
  REGION 1..217: note = Description of Artificial Sequence: Synthetic polypeptide
  REGION 1..217: note = Synthetic Construct
APELLGGPSVFLFPPKPKDTLMISRTPEVTCVVVDVSHEDPEVKFNWYVDGVEVHNAKTKPREEQYNSTYRVVSVLTVLHQDWLNGKEYKCKVSNKALPAPIEKTISKAKGQPREPQVYTLPPSRDELTKNQVSLSCAVKGFYPSDIAVEWESFGTEWSSYKTTPPVLDSDGSFFLVSKLTVSKEEWQQGFVFSCSVLHEALHSHYTQKSLSLSPGK

SEQ ID NO: 2443 - protein, 217 aa, synthetic construct
  REGION 1..217: note = Description of Artificial Sequence: Synthetic polypeptide
  REGION 1..217: note = Synthetic Construct
APEAAGGPSVFLFPPKPKDTLMISRTPEVTCVVVDVSHEDPEVKFNWYVDGVEVHNAKTKPREEQYNSTYRVVSVLTVLHQDWLNGKEYKCKVSNKALPAPIEKTISKAKGQPREPQVYTLPPSRDELTKNQVSLSCAVKGFYPSDIAVEWESFGTEWSSYKTTPPVLDSDGSFFLVSKLTVSKEEWQQGFVFSCSVLHEALHSHYTQKSLSLSPGK

SEQ ID NO: 2444 - protein, 217 aa, synthetic construct
  REGION 1..217: note = Description of Artificial Sequence: Synthetic polypeptide
  REGION 1..217: note = Synthetic Construct
APEAAGGPSVFLFPPKPKDTLMISRTPEVTCVVVDVSHEDPEVKFNWYVDGVEVHNAKTKPREEQYNSTYRVVSVLTVLHQDWLNGKEYKCKVSNKALGAPIEKTISKAKGQPREPQVYTLPPSRDELTKNQVSLSCAVKGFYPSDIAVEWESFGTEWSSYKTTPPVLDSDGSFFLVSKLTVSKEEWQQGFVFSCSVLHEALHSHYTQKSLSLSPGK

SEQ ID NO: 2445 - protein, 217 aa, synthetic construct
  REGION 1..217: note = Description of Artificial Sequence: Synthetic polypeptide
  REGION 1..217: note = Synthetic Construct
APELLGGPSVFLFPPKPKDTLMISRTPEVTCVVVDVSHEDPEVKFNWYVDGVEVHNAKTKPREEQYNSTYRVVSVLTVLHQDWLNGKEYKCKVSNKALPAPIEKTISKAKGQPREPQVYTLPPSRDELTKNQVSLTCLVKGFYPSDIAVWWESYGTEWSSYKTTPPVLDSDGSFFLYSKLTVTKEEWQQGFVFSCSVLHEALHSHYTQKSLSLSPGK

SEQ ID NO: 2446 - protein, 217 aa, synthetic construct
  REGION 1..217: note = Description of Artificial Sequence: Synthetic polypeptide
  REGION 1..217: note = Synthetic Construct
APELLGGPSVFLFPPKPKDTLMISRTPEVTCVVVDVSHEDPEVKFNWYVDGVEVHNAKTKPREEQYNSTYRVVSVLTVLHQDWLNGKEYKCKVSNKALPAPIEKTISKAKGQPREPQVYTLPPSRDELTKNQVSLWCLVKGFYPSDIAVWWESYGTEWSSYKTTPPVLDSDGSFFLYSKLTVTKEEWQQGFVFSCSVLHEALHSHYTQKSLSLSPGK

SEQ ID NO: 2447 - protein, 217 aa, synthetic construct
  REGION 1..217: note = Description of Artificial Sequence: Synthetic polypeptide
  REGION 1..217: note = Synthetic Construct
APEAAGGPSVFLFPPKPKDTLMISRTPEVTCVVVDVSHEDPEVKFNWYVDGVEVHNAKTKPREEQYNSTYRVVSVLTVLHQDWLNGKEYKCKVSNKALPAPIEKTISKAKGQPREPQVYTLPPSRDELTKNQVSLWCLVKGFYPSDIAVWWESYGTEWSSYKTTPPVLDSDGSFFLYSKLTVTKEEWQQGFVFSCSVLHEALHSHYTQKSLSLSPGK

SEQ ID NO: 2448 - protein, 217 aa, synthetic construct
  REGION 1..217: note = Description of Artificial Sequence: Synthetic polypeptide
  REGION 1..217: note = Synthetic Construct
APEAAGGPSVFLFPPKPKDTLMISRTPEVTCVVVDVSHEDPEVKFNWYVDGVEVHNAKTKPREEQYNSTYRVVSVLTVLHQDWLNGKEYKCKVSNKALGAPIEKTISKAKGQPREPQVYTLPPSRDELTKNQVSLWCLVKGFYPSDIAVWWESYGTEWSSYKTTPPVLDSDGSFFLYSKLTVTKEEWQQGFVFSCSVLHEALHSHYTQKSLSLSPGK

SEQ ID NO: 2449 - protein, 217 aa, synthetic construct
  REGION 1..217: note = Description of Artificial Sequence: Synthetic polypeptide
  REGION 1..217: note = Synthetic Construct
APELLGGPSVFLFPPKPKDTLMISRTPEVTCVVVDVSHEDPEVKFNWYVDGVEVHNAKTKPREEQYNSTYRVVSVLTVLHQDWLNGKEYKCKVSNKALPAPIEKTISKAKGQPREPQVYTLPPSRDELTKNQVSLSCAVKGFYPSDIAVWWESYGTEWSSYKTTPPVLDSDGSFFLVSKLTVTKEEWQQGFVFSCSVLHEALHSHYTQKSLSLSPGK

SEQ ID NO: 2450 - protein, 217 aa, synthetic construct
  REGION 1..217: note = Description of Artificial Sequence: Synthetic polypeptide
  REGION 1..217: note = Synthetic Construct
APEAAGGPSVFLFPPKPKDTLMISRTPEVTCVVVDVSHEDPEVKFNWYVDGVEVHNAKTKPREEQYNSTYRVVSVLTVLHQDWLNGKEYKCKVSNKALPAPIEKTISKAKGQPREPQVYTLPPSRDELTKNQVSLSCAVKGFYPSDIAVWWESYGTEWSSYKTTPPVLDSDGSFFLVSKLTVTKEEWQQGFVFSCSVLHEALHSHYTQKSLSLSPGK

SEQ ID NO: 2451 - protein, 217 aa, synthetic construct
  REGION 1..217: note = Description of Artificial Sequence: Synthetic polypeptide
  REGION 1..217: note = Synthetic Construct
APEAAGGPSVFLFPPKPKDTLMISRTPEVTCVVVDVSHEDPEVKFNWYVDGVEVHNAKTKPREEQYNSTYRVVSVLTVLHQDWLNGKEYKCKVSNKALGAPIEKTISKAKGQPREPQVYTLPPSRDELTKNQVSLSCAVKGFYPSDIAVWWESYGTEWSSYKTTPPVLDSDGSFFLVSKLTVTKEEWQQGFVFSCSVLHEALHSHYTQKSLSLSPGK

SEQ ID NO: 2452 - protein, 217 aa, synthetic construct
  REGION 1..217: note = Description of Artificial Sequence: Synthetic polypeptide
  REGION 1..217: note = Synthetic Construct
APELLGGPSVFLFPPKPKDTLMISRTPEVTCVVVDVSHEDPEVKFNWYVDGVEVHNAKTKPREEQYNSTYRVVSVLTVLHQDWLNGKEYKCKVSNKALPAPIEKTISKAKGQPREPQVYTLPPSRDELTKNQVSLTCLVKGFYPSDIAVLWESYGTEWASYKTTPPVLDSDGSFFLYSKLTVTKEEWQQGFVFSCSVLHEALHSHYTQKSLSLSPGK

SEQ ID NO: 2453 - protein, 217 aa, synthetic construct
  REGION 1..217: note = Description of Artificial Sequence: Synthetic polypeptide
  REGION 1..217: note = Synthetic Construct
APELLGGPSVFLFPPKPKDTLMISRTPEVTCVVVDVSHEDPEVKFNWYVDGVEVHNAKTKPREEQYNSTYRVVSVLTVLHQDWLNGKEYKCKVSNKALPAPIEKTISKAKGQPREPQVYTLPPSRDELTKNQVSLWCLVKGFYPSDIAVLWESYGTEWASYKTTPPVLDSDGSFFLYSKLTVTKEEWQQGFVFSCSVLHEALHSHYTQKSLSLSPGK

SEQ ID NO: 2454 - protein, 217 aa, synthetic construct
  REGION 1..217: note = Description of Artificial Sequence: Synthetic polypeptide
  REGION 1..217: note = Synthetic Construct
APEAAGGPSVFLFPPKPKDTLMISRTPEVTCVVVDVSHEDPEVKFNWYVDGVEVHNAKTKPREEQYNSTYRVVSVLTVLHQDWLNGKEYKCKVSNKALPAPIEKTISKAKGQPREPQVYTLPPSRDELTKNQVSLWCLVKGFYPSDIAVLWESYGTEWASYKTTPPVLDSDGSFFLYSKLTVTKEEWQQGFVFSCSVLHEALHSHYTQKSLSLSPGK

SEQ ID NO: 2455 - protein, 217 aa, synthetic construct
  REGION 1..217: note = Description of Artificial Sequence: Synthetic polypeptide
  REGION 1..217: note = Synthetic Construct
APEAAGGPSVFLFPPKPKDTLMISRTPEVTCVVVDVSHEDPEVKFNWYVDGVEVHNAKTKPREEQYNSTYRVVSVLTVLHQDWLNGKEYKCKVSNKALGAPIEKTISKAKGQPREPQVYTLPPSRDELTKNQVSLWCLVKGFYPSDIAVLWESYGTEWASYKTTPPVLDSDGSFFLYSKLTVTKEEWQQGFVFSCSVLHEALHSHYTQKSLSLSPGK

SEQ ID NO: 2456 - protein, 217 aa, synthetic construct
  REGION 1..217: note = Description of Artificial Sequence: Synthetic polypeptide
  REGION 1..217: note = Synthetic Construct
APELLGGPSVFLFPPKPKDTLMISRTPEVTCVVVDVSHEDPEVKFNWYVDGVEVHNAKTKPREEQYNSTYRVVSVLTVLHQDWLNGKEYKCKVSNKALPAPIEKTISKAKGQPREPQVYTLPPSRDELTKNQVSLSCAVKGFYPSDIAVLWESYGTEWASYKTTPPVLDSDGSFFLVSKLTVTKEEWQQGFVFSCSVLHEALHSHYTQKSLSLSPGK

SEQ ID NO: 2457 - protein, 217 aa, synthetic construct
  REGION 1..217: note = Description of Artificial Sequence: Synthetic polypeptide
  REGION 1..217: note = Synthetic Construct
APEAAGGPSVFLFPPKPKDTLMISRTPEVTCVVVDVSHEDPEVKFNWYVDGVEVHNAKTKPREEQYNSTYRVVSVLTVLHQDWLNGKEYKCKVSNKALPAPIEKTISKAKGQPREPQVYTLPPSRDELTKNQVSLSCAVKGFYPSDIAVLWESYGTEWASYKTTPPVLDSDGSFFLVSKLTVTKEEWQQGFVFSCSVLHEALHSHYTQKSLSLSPGK

SEQ ID NO: 2458 - protein, 217 aa, synthetic construct
  REGION 1..217: note = Description of Artificial Sequence: Synthetic polypeptide
  REGION 1..217: note = Synthetic Construct
APEAAGGPSVFLFPPKPKDTLMISRTPEVTCVVVDVSHEDPEVKFNWYVDGVEVHNAKTKPREEQYNSTYRVVSVLTVLHQDWLNGKEYKCKVSNKALGAPIEKTISKAKGQPREPQVYTLPPSRDELTKNQVSLSCAVKGFYPSDIAVLWESYGTEWASYKTTPPVLDSDGSFFLVSKLTVTKEEWQQGFVFSCSVLHEALHSHYTQKSLSLSPGK

SEQ ID NO: 2459 - protein, 217 aa, synthetic construct
  REGION 1..217: note = Description of Artificial Sequence: Synthetic polypeptide
  REGION 1..217: note = Synthetic Construct
APELLGGPSVFLFPPKPKDTLMISRTPEVTCVVVDVSHEDPEVKFNWYVDGVEVHNAKTKPREEQYNSTYRVVSVLTVLHQDWLNGKEYKCKVSNKALPAPIEKTISKAKGQPREPQVYTLPPSRDELTKNQVSLTCLVKGFYPSDIAVEWESYGTEWSNYKTTPPVLDSDGSFFLYSKLTVTKEEWQQGFVFSCSVLHEALHSHYTQKSLSLSPGK

SEQ ID NO: 2460 - protein, 217 aa, synthetic construct
  REGION 1..217: note = Description of Artificial Sequence: Synthetic polypeptide
  REGION 1..217: note = Synthetic Construct
APELLGGPSVFLFPPKPKDTLMISRTPEVTCVVVDVSHEDPEVKFNWYVDGVEVHNAKTKPREEQYNSTYRVVSVLTVLHQDWLNGKEYKCKVSNKALPAPIEKTISKAKGQPREPQVYTLPPSRDELTKNQVSLWCLVKGFYPSDIAVEWESYGTEWSNYKTTPPVLDSDGSFFLYSKLTVTKEEWQQGFVFSCSVLHEALHSHYTQKSLSLSPGK

SEQ ID NO: 2461 - protein, 217 aa, synthetic construct
  REGION 1..217: note = Description of Artificial Sequence: Synthetic polypeptide
  REGION 1..217: note = Synthetic Construct
APEAAGGPSVFLFPPKPKDTLMISRTPEVTCVVVDVSHEDPEVKFNWYVDGVEVHNAKTKPREEQYNSTYRVVSVLTVLHQDWLNGKEYKCKVSNKALPAPIEKTISKAKGQPREPQVYTLPPSRDELTKNQVSLWCLVKGFYPSDIAVEWESYGTEWSNYKTTPPVLDSDGSFFLYSKLTVTKEEWQQGFVFSCSVLHEALHSHYTQKSLSLSPGK

SEQ ID NO: 2462 - protein, 217 aa, synthetic construct
  REGION 1..217: note = Description of Artificial Sequence: Synthetic polypeptide
  REGION 1..217: note = Synthetic Construct
APEAAGGPSVFLFPPKPKDTLMISRTPEVTCVVVDVSHEDPEVKFNWYVDGVEVHNAKTKPREEQYNSTYRVVSVLTVLHQDWLNGKEYKCKVSNKALGAPIEKTISKAKGQPREPQVYTLPPSRDELTKNQVSLWCLVKGFYPSDIAVEWESYGTEWSNYKTTPPVLDSDGSFFLYSKLTVTKEEWQQGFVFSCSVLHEALHSHYTQKSLSLSPGK

SEQ ID NO: 2463 - protein, 217 aa, synthetic construct
  REGION 1..217: note = Description of Artificial Sequence: Synthetic polypeptide
  REGION 1..217: note = Synthetic Construct
APELLGGPSVFLFPPKPKDTLMISRTPEVTCVVVDVSHEDPEVKFNWYVDGVEVHNAKTKPREEQYNSTYRVVSVLTVLHQDWLNGKEYKCKVSNKALPAPIEKTISKAKGQPREPQVYTLPPSRDELTKNQVSLSCAVKGFYPSDIAVEWESYGTEWSNYKTTPPVLDSDGSFFLVSKLTVTKEEWQQGFVFSCSVLHEALHSHYTQKSLSLSPGK

SEQ ID NO: 2464 - protein, 217 aa, synthetic construct
  REGION 1..217: note = Description of Artificial Sequence: Synthetic polypeptide
  REGION 1..217: note = Synthetic Construct
APEAAGGPSVFLFPPKPKDTLMISRTPEVTCVVVDVSHEDPEVKFNWYVDGVEVHNAKTKPREEQYNSTYRVVSVLTVLHQDWLNGKEYKCKVSNKALPAPIEKTISKAKGQPREPQVYTLPPSRDELTKNQVSLSCAVKGFYPSDIAVEWESYGTEWSNYKTTPPVLDSDGSFFLVSKLTVTKEEWQQGFVFSCSVLHEALHSHYTQKSLSLSPGK

SEQ ID NO: 2465 - protein, 217 aa, synthetic construct
  REGION 1..217: note = Description of Artificial Sequence: Synthetic polypeptide
  REGION 1..217: note = Synthetic Construct
APEAAGGPSVFLFPPKPKDTLMISRTPEVTCVVVDVSHEDPEVKFNWYVDGVEVHNAKTKPREEQYNSTYRVVSVLTVLHQDWLNGKEYKCKVSNKALGAPIEKTISKAKGQPREPQVYTLPPSRDELTKNQVSLSCAVKGFYPSDIAVEWESYGTEWSNYKTTPPVLDSDGSFFLVSKLTVTKEEWQQGFVFSCSVLHEALHSHYTQKSLSLSPGK

SEQ ID NO: 2466 - protein, 217 aa, synthetic construct
  REGION 1..217: note = Description of Artificial Sequence: Synthetic polypeptide
  REGION 1..217: note = Synthetic Construct
APELLGGPSVFLFPPKPKDTLMISRTPEVTCVVVDVSHEDPEVKFNWYVDGVEVHNAKTKPREEQYNSTYRVVSVLTVLHQDWLNGKEYKCKVSNKALPAPIEKTISKAKGQPREPQVYTLPPSRDELTKNQVSLTCLVKGFYPSDIAVEWESFGTEWSNYKTTPPVLDSDGSFFLYSKLTVSKEEWQQGFVFSCSVLHEALHSHYTQKSLSLSPGK

SEQ ID NO: 2467 - protein, 217 aa, synthetic construct
  REGION 1..217: note = Description of Artificial Sequence: Synthetic polypeptide
  REGION 1..217: note = Synthetic Construct
APELLGGPSVFLFPPKPKDTLMISRTPEVTCVVVDVSHEDPEVKFNWYVDGVEVHNAKTKPREEQYNSTYRVVSVLTVLHQDWLNGKEYKCKVSNKALPAPIEKTISKAKGQPREPQVYTLPPSRDELTKNQVSLWCLVKGFYPSDIAVEWESFGTEWSNYKTTPPVLDSDGSFFLYSKLTVSKEEWQQGFVFSCSVLHEALHSHYTQKSLSLSPGK

SEQ ID NO: 2468 - protein, 217 aa, synthetic construct
  REGION 1..217: note = Description of Artificial Sequence: Synthetic polypeptide
  REGION 1..217: note = Synthetic Construct
APEAAGGPSVFLFPPKPKDTLMISRTPEVTCVVVDVSHEDPEVKFNWYVDGVEVHNAKTKPREEQYNSTYRVVSVLTVLHQDWLNGKEYKCKVSNKALPAPIEKTISKAKGQPREPQVYTLPPSRDELTKNQVSLWCLVKGFYPSDIAVEWESFGTEWSNYKTTPPVLDSDGSFFLYSKLTVSKEEWQQGFVFSCSVLHEALHSHYTQKSLSLSPGK

SEQ ID NO: 2469 - protein, 217 aa, synthetic construct
  REGION 1..217: note = Description of Artificial Sequence: Synthetic polypeptide
  REGION 1..217: note = Synthetic Construct
APEAAGGPSVFLFPPKPKDTLMISRTPEVTCVVVDVSHEDPEVKFNWYVDGVEVHNAKTKPREEQYNSTYRVVSVLTVLHQDWLNGKEYKCKVSNKALGAPIEKTISKAKGQPREPQVYTLPPSRDELTKNQVSLWCLVKGFYPSDIAVEWESFGTEWSNYKTTPPVLDSDGSFFLYSKLTVSKEEWQQGFVFSCSVLHEALHSHYTQKSLSLSPGK

SEQ ID NO: 2470 - protein, 217 aa, synthetic construct
  REGION 1..217: note = Description of Artificial Sequence: Synthetic polypeptide
  REGION 1..217: note = Synthetic Construct
APELLGGPSVFLFPPKPKDTLMISRTPEVTCVVVDVSHEDPEVKFNWYVDGVEVHNAKTKPREEQYNSTYRVVSVLTVLHQDWLNGKEYKCKVSNKALPAPIEKTISKAKGQPREPQVYTLPPSRDELTKNQVSLSCAVKGFYPSDIAVEWESFGTEWSNYKTTPPVLDSDGSFFLVSKLTVSKEEWQQGFVFSCSVLHEALHSHYTQKSLSLSPGK

SEQ ID NO: 2471 - protein, 217 aa, synthetic construct
  REGION 1..217: note = Description of Artificial Sequence: Synthetic polypeptide
  REGION 1..217: note = Synthetic Construct
APEAAGGPSVFLFPPKPKDTLMISRTPEVTCVVVDVSHEDPEVKFNWYVDGVEVHNAKTKPREEQYNSTYRVVSVLTVLHQDWLNGKEYKCKVSNKALPAPIEKTISKAKGQPREPQVYTLPPSRDELTKNQVSLSCAVKGFYPSDIAVEWESFGTEWSNYKTTPPVLDSDGSFFLVSKLTVSKEEWQQGFVFSCSVLHEALHSHYTQKSLSLSPGK

SEQ ID NO: 2472 - protein, 217 aa, synthetic construct
  REGION 1..217: note = Description of Artificial Sequence: Synthetic polypeptide
  REGION 1..217: note = Synthetic Construct
APEAAGGPSVFLFPPKPKDTLMISRTPEVTCVVVDVSHEDPEVKFNWYVDGVEVHNAKTKPREEQYNSTYRVVSVLTVLHQDWLNGKEYKCKVSNKALGAPIEKTISKAKGQPREPQVYTLPPSRDELTKNQVSLSCAVKGFYPSDIAVEWESFGTEWSNYKTTPPVLDSDGSFFLVSKLTVSKEEWQQGFVFSCSVLHEALHSHYTQKSLSLSPGK

SEQ ID NO: 2473 - protein, 217 aa, synthetic construct
  REGION 1..217: note = Description of Artificial Sequence: Synthetic polypeptide
  REGION 1..217: note = Synthetic Construct
APELLGGPSVFLFPPKPKDTLMISRTPEVTCVVVDVSHEDPEVKFNWYVDGVEVHNAKTKPREEQYNSTYRVVSVLTVLHQDWLNGKEYKCKVSNKALPAPIEKTISKAKGQPREPQVYTLPPSRDELTKNQVSLTCLVKGFYPSDIAVEWESYGTEWANYKTTPPVLDSDGSFFLYSKLTVTKEEWQQGFVFSCSVLHEALHSHYTQKSLSLSPGK

SEQ ID NO: 2474 - protein, 217 aa, synthetic construct
  REGION 1..217: note = Description of Artificial Sequence: Synthetic polypeptide
  REGION 1..217: note = Synthetic Construct
APELLGGPSVFLFPPKPKDTLMISRTPEVTCVVVDVSHEDPEVKFNWYVDGVEVHNAKTKPREEQYNSTYRVVSVLTVLHQDWLNGKEYKCKVSNKALPAPIEKTISKAKGQPREPQVYTLPPSRDELTKNQVSLWCLVKGFYPSDIAVEWESYGTEWANYKTTPPVLDSDGSFFLYSKLTVTKEEWQQGFVFSCSVLHEALHSHYTQKSLSLSPGK

SEQ ID NO: 2475 - protein, 217 aa, synthetic construct
  REGION 1..217: note = Description of Artificial Sequence: Synthetic polypeptide
  REGION 1..217: note = Synthetic Construct
APEAAGGPSVFLFPPKPKDTLMISRTPEVTCVVVDVSHEDPEVKFNWYVDGVEVHNAKTKPREEQYNSTYRVVSVLTVLHQDWLNGKEYKCKVSNKALPAPIEKTISKAKGQPREPQVYTLPPSRDELTKNQVSLWCLVKGFYPSDIAVEWESYGTEWANYKTTPPVLDSDGSFFLYSKLTVTKEEWQQGFVFSCSVLHEALHSHYTQKSLSLSPGK

SEQ ID NO: 2476 - protein, 217 aa, synthetic construct
  REGION 1..217: note = Description of Artificial Sequence: Synthetic polypeptide
  REGION 1..217: note = Synthetic Construct
APEAAGGPSVFLFPPKPKDTLMISRTPEVTCVVVDVSHEDPEVKFNWYVDGVEVHNAKTKPREEQYNSTYRVVSVLTVLHQDWLNGKEYKCKVSNKALGAPIEKTISKAKGQPREPQVYTLPPSRDELTKNQVSLWCLVKGFYPSDIAVEWESYGTEWANYKTTPPVLDSDGSFFLYSKLTVTKEEWQQGFVFSCSVLHEALHSHYTQKSLSLSPGK

SEQ ID NO: 2477 - protein, 217 aa, synthetic construct
  REGION 1..217: note = Description of Artificial Sequence: Synthetic polypeptide
  REGION 1..217: note = Synthetic Construct
APELLGGPSVFLFPPKPKDTLMISRTPEVTCVVVDVSHEDPEVKFNWYVDGVEVHNAKTKPREEQYNSTYRVVSVLTVLHQDWLNGKEYKCKVSNKALPAPIEKTISKAKGQPREPQVYTLPPSRDELTKNQVSLSCAVKGFYPSDIAVEWESYGTEWANYKTTPPVLDSDGSFFLVSKLTVTKEEWQQGFVFSCSVLHEALHSHYTQKSLSLSPGK

SEQ ID NO: 2478 - protein, 217 aa, synthetic construct
  REGION 1..217: note = Description of Artificial Sequence: Synthetic polypeptide
  REGION 1..217: note = Synthetic Construct
APEAAGGPSVFLFPPKPKDTLMISRTPEVTCVVVDVSHEDPEVKFNWYVDGVEVHNAKTKPREEQYNSTYRVVSVLTVLHQDWLNGKEYKCKVSNKALPAPIEKTISKAKGQPREPQVYTLPPSRDELTKNQVSLSCAVKGFYPSDIAVEWESYGTEWANYKTTPPVLDSDGSFFLVSKLTVTKEEWQQGFVFSCSVLHEALHSHYTQKSLSLSPGK

SEQ ID NO: 2479 - protein, 217 aa, synthetic construct
  REGION 1..217: note = Description of Artificial Sequence: Synthetic polypeptide
  REGION 1..217: note = Synthetic Construct
APEAAGGPSVFLFPPKPKDTLMISRTPEVTCVVVDVSHEDPEVKFNWYVDGVEVHNAKTKPREEQYNSTYRVVSVLTVLHQDWLNGKEYKCKVSNKALGAPIEKTISKAKGQPREPQVYTLPPSRDELTKNQVSLSCAVKGFYPSDIAVEWESYGTEWANYKTTPPVLDSDGSFFLVSKLTVTKEEWQQGFVFSCSVLHEALHSHYTQKSLSLSPGK

SEQ ID NO: 2480 - protein, 217 aa, synthetic construct
  REGION 1..217: note = Description of Artificial Sequence: Synthetic polypeptide
  REGION 1..217: note = Synthetic Construct
APELLGGPSVFLFPPKPKDTLMISRTPEVTCVVVDVSHEDPEVKFNWYVDGVEVHNAKTKPREEQYNSTYRVVSVLTVLHQDWLNGKEYKCKVSNKALPAPIEKTISKAKGQPREPQVYTLPPSRDELTKNQVSLTCLVKGFYPSDIAVEWESYGTEWANYKTTPPVLDSDGSFFLYSKLTVSKSEWQQGFVFSCSVLHEALHSHYTQKSLSLSPGK

SEQ ID NO: 2481 - protein, 217 aa, synthetic construct
  REGION 1..217: note = Description of Artificial Sequence: Synthetic polypeptide
  REGION 1..217: note = Synthetic Construct
APELLGGPSVFLFPPKPKDTLMISRTPEVTCVVVDVSHEDPEVKFNWYVDGVEVHNAKTKPREEQYNSTYRVVSVLTVLHQDWLNGKEYKCKVSNKALPAPIEKTISKAKGQPREPQVYTLPPSRDELTKNQVSLWCLVKGFYPSDIAVEWESYGTEWANYKTTPPVLDSDGSFFLYSKLTVSKSEWQQGFVFSCSVLHEALHSHYTQKSLSLSPGK

SEQ ID NO: 2482 - protein, 217 aa, synthetic construct
  REGION 1..217: note = Description of Artificial Sequence: Synthetic polypeptide
  REGION 1..217: note = Synthetic Construct
APEAAGGPSVFLFPPKPKDTLMISRTPEVTCVVVDVSHEDPEVKFNWYVDGVEVHNAKTKPREEQYNSTYRVVSVLTVLHQDWLNGKEYKCKVSNKALPAPIEKTISKAKGQPREPQVYTLPPSRDELTKNQVSLWCLVKGFYPSDIAVEWESYGTEWANYKTTPPVLDSDGSFFLYSKLTVSKSEWQQGFVFSCSVLHEALHSHYTQKSLSLSPGK

SEQ ID NO: 2483 - protein, 217 aa, synthetic construct
  REGION 1..217: note = Description of Artificial Sequence: Synthetic polypeptide
  REGION 1..217: note = Synthetic Construct
APEAAGGPSVFLFPPKPKDTLMISRTPEVTCVVVDVSHEDPEVKFNWYVDGVEVHNAKTKPREEQYNSTYRVVSVLTVLHQDWLNGKEYKCKVSNKALGAPIEKTISKAKGQPREPQVYTLPPSRDELTKNQVSLWCLVKGFYPSDIAVEWESYGTEWANYKTTPPVLDSDGSFFLYSKLTVSKSEWQQGFVFSCSVLHEALHSHYTQKSLSLSPGK

SEQ ID NO: 2484 - protein, 217 aa, synthetic construct
  REGION 1..217: note = Description of Artificial Sequence: Synthetic polypeptide
  REGION 1..217: note = Synthetic Construct
APELLGGPSVFLFPPKPKDTLMISRTPEVTCVVVDVSHEDPEVKFNWYVDGVEVHNAKTKPREEQYNSTYRVVSVLTVLHQDWLNGKEYKCKVSNKALPAPIEKTISKAKGQPREPQVYTLPPSRDELTKNQVSLSCAVKGFYPSDIAVEWESYGTEWANYKTTPPVLDSDGSFFLVSKLTVSKSEWQQGFVFSCSVLHEALHSHYTQKSLSLSPGK

SEQ ID NO: 2485 - protein, 217 aa, synthetic construct
  REGION 1..217: note = Description of Artificial Sequence: Synthetic polypeptide
  REGION 1..217: note = Synthetic Construct
APEAAGGPSVFLFPPKPKDTLMISRTPEVTCVVVDVSHEDPEVKFNWYVDGVEVHNAKTKPREEQYNSTYRVVSVLTVLHQDWLNGKEYKCKVSNKALPAPIEKTISKAKGQPREPQVYTLPPSRDELTKNQVSLSCAVKGFYPSDIAVEWESYGTEWANYKTTPPVLDSDGSFFLVSKLTVSKSEWQQGFVFSCSVLHEALHSHYTQKSLSLSPGK

SEQ ID NO: 2486 - protein, 217 aa, synthetic construct
  REGION 1..217: note = Description of Artificial Sequence: Synthetic polypeptide
  REGION 1..217: note = Synthetic Construct
APEAAGGPSVFLFPPKPKDTLMISRTPEVTCVVVDVSHEDPEVKFNWYVDGVEVHNAKTKPREEQYNSTYRVVSVLTVLHQDWLNGKEYKCKVSNKALGAPIEKTISKAKGQPREPQVYTLPPSRDELTKNQVSLSCAVKGFYPSDIAVEWESYGTEWANYKTTPPVLDSDGSFFLVSKLTVSKSEWQQGFVFSCSVLHEALHSHYTQKSLSLSPGK

SEQ ID NO: 2487 - protein, 217 aa, synthetic construct
  REGION 1..217: note = Description of Artificial Sequence: Synthetic polypeptide
  REGION 1..217: note = Synthetic Construct
APELLGGPSVFLFPPKPKDTLMISRTPEVTCVVVDVSHEDPEVKFNWYVDGVEVHNAKTKPREEQYNSTYRVVSVLTVLHQDWLNGKEYKCKVSNKALPAPIEKTISKAKGQPREPQVYTLPPSRDELTKNQVSLTCLVKGFYPSDIAVEWESYGTEWVNYKTTPPVLDSDGSFFLYSKLTVTKEEWQQGFVFSCSVLHEALHSHYTQKSLSLSPGK

SEQ ID NO: 2488 - protein, 217 aa, synthetic construct
  REGION 1..217: note = Description of Artificial Sequence: Synthetic polypeptide
  REGION 1..217: note = Synthetic Construct
APELLGGPSVFLFPPKPKDTLMISRTPEVTCVVVDVSHEDPEVKFNWYVDGVEVHNAKTKPREEQYNSTYRVVSVLTVLHQDWLNGKEYKCKVSNKALPAPIEKTISKAKGQPREPQVYTLPPSRDELTKNQVSLWCLVKGFYPSDIAVEWESYGTEWVNYKTTPPVLDSDGSFFLYSKLTVTKEEWQQGFVFSCSVLHEALHSHYTQKSLSLSPGK

SEQ ID NO: 2489 - protein, 217 aa, synthetic construct
  REGION 1..217: note = Description of Artificial Sequence: Synthetic polypeptide
  REGION 1..217: note = Synthetic Construct
APEAAGGPSVFLFPPKPKDTLMISRTPEVTCVVVDVSHEDPEVKFNWYVDGVEVHNAKTKPREEQYNSTYRVVSVLTVLHQDWLNGKEYKCKVSNKALPAPIEKTISKAKGQPREPQVYTLPPSRDELTKNQVSLWCLVKGFYPSDIAVEWESYGTEWVNYKTTPPVLDSDGSFFLYSKLTVTKEEWQQGFVFSCSVLHEALHSHYTQKSLSLSPGK

SEQ ID NO: 2490 - protein, 217 aa, synthetic construct
  REGION 1..217: note = Description of Artificial Sequence: Synthetic polypeptide
  REGION 1..217: note = Synthetic Construct
APEAAGGPSVFLFPPKPKDTLMISRTPEVTCVVVDVSHEDPEVKFNWYVDGVEVHNAKTKPREEQYNSTYRVVSVLTVLHQDWLNGKEYKCKVSNKALGAPIEKTISKAKGQPREPQVYTLPPSRDELTKNQVSLWCLVKGFYPSDIAVEWESYGTEWVNYKTTPPVLDSDGSFFLYSKLTVTKEEWQQGFVFSCSVLHEALHSHYTQKSLSLSPGK

SEQ ID NO: 2491 - protein, 217 aa, synthetic construct
  REGION 1..217: note = Description of Artificial Sequence: Synthetic polypeptide
  REGION 1..217: note = Synthetic Construct
APELLGGPSVFLFPPKPKDTLMISRTPEVTCVVVDVSHEDPEVKFNWYVDGVEVHNAKTKPREEQYNSTYRVVSVLTVLHQDWLNGKEYKCKVSNKALPAPIEKTISKAKGQPREPQVYTLPPSRDELTKNQVSLSCAVKGFYPSDIAVEWESYGTEWVNYKTTPPVLDSDGSFFLVSKLTVTKEEWQQGFVFSCSVLHEALHSHYTQKSLSLSPGK

SEQ ID NO: 2492 - protein, 217 aa, synthetic construct
  REGION 1..217: note = Description of Artificial Sequence: Synthetic polypeptide
  REGION 1..217: note = Synthetic Construct
APEAAGGPSVFLFPPKPKDTLMISRTPEVTCVVVDVSHEDPEVKFNWYVDGVEVHNAKTKPREEQYNSTYRVVSVLTVLHQDWLNGKEYKCKVSNKALPAPIEKTISKAKGQPREPQVYTLPPSRDELTKNQVSLSCAVKGFYPSDIAVEWESYGTEWVNYKTTPPVLDSDGSFFLVSKLTVTKEEWQQGFVFSCSVLHEALHSHYTQKSLSLSPGK

SEQ ID NO: 2493 - protein, 217 aa, synthetic construct
  REGION 1..217: note = Description of Artificial Sequence: Synthetic polypeptide
  REGION 1..217: note = Synthetic Construct
APEAAGGPSVFLFPPKPKDTLMISRTPEVTCVVVDVSHEDPEVKFNWYVDGVEVHNAKTKPREEQYNSTYRVVSVLTVLHQDWLNGKEYKCKVSNKALGAPIEKTISKAKGQPREPQVYTLPPSRDELTKNQVSLSCAVKGFYPSDIAVEWESYGTEWVNYKTTPPVLDSDGSFFLVSKLTVTKEEWQQGFVFSCSVLHEALHSHYTQKSLSLSPGK

SEQ ID NO: 2494 - protein, 217 aa, synthetic construct
  REGION 1..217: note = Description of Artificial Sequence: Synthetic polypeptide
  REGION 1..217: note = Synthetic Construct
APELLGGPSVFLFPPKPKDTLMISRTPEVTCVVVDVSHEDPEVKFNWYVDGVEVHNAKTKPREEQYNSTYRVVSVLTVLHQDWLNGKEYKCKVSNKALPAPIEKTISKAKGQPREPQVYTLPPSRDELTKNQVSLTCLVKGFYPSDIAVEWESYGTEWSNYKTTPPVLDSDGSFFLYSKLTVSKEEWQQGFVFSCSVLHEALHSHYTQKSLSLSPGK

SEQ ID NO: 2495 - protein, 217 aa, synthetic construct
  REGION 1..217: note = Description of Artificial Sequence: Synthetic polypeptide
  REGION 1..217: note = Synthetic Construct
APELLGGPSVFLFPPKPKDTLMISRTPEVTCVVVDVSHEDPEVKFNWYVDGVEVHNAKTKPREEQYNSTYRVVSVLTVLHQDWLNGKEYKCKVSNKALPAPIEKTISKAKGQPREPQVYTLPPSRDELTKNQVSLWCLVKGFYPSDIAVEWESYGTEWSNYKTTPPVLDSDGSFFLYSKLTVSKEEWQQGFVFSCSVLHEALHSHYTQKSLSLSPGK

SEQ ID NO: 2496 - protein, 217 aa, synthetic construct
  REGION 1..217: note = Description of Artificial Sequence: Synthetic polypeptide
  REGION 1..217: note = Synthetic Construct
APEAAGGPSVFLFPPKPKDTLMISRTPEVTCVVVDVSHEDPEVKFNWYVDGVEVHNAKTKPREEQYNSTYRVVSVLTVLHQDWLNGKEYKCKVSNKALPAPIEKTISKAKGQPREPQVYTLPPSRDELTKNQVSLWCLVKGFYPSDIAVEWESYGTEWSNYKTTPPVLDSDGSFFLYSKLTVSKEEWQQGFVFSCSVLHEALHSHYTQKSLSLSPGK

SEQ ID NO: 2497 - protein, 217 aa, synthetic construct
  REGION 1..217: note = Description of Artificial Sequence: Synthetic polypeptide
  REGION 1..217: note = Synthetic Construct
APEAAGGPSVFLFPPKPKDTLMISRTPEVTCVVVDVSHEDPEVKFNWYVDGVEVHNAKTKPREEQYNSTYRVVSVLTVLHQDWLNGKEYKCKVSNKALGAPIEKTISKAKGQPREPQVYTLPPSRDELTKNQVSLWCLVKGFYPSDIAVEWESYGTEWSNYKTTPPVLDSDGSFFLYSKLTVSKEEWQQGFVFSCSVLHEALHSHYTQKSLSLSPGK

SEQ ID NO: 2498 - protein, 217 aa, synthetic construct
  REGION 1..217: note = Description of Artificial Sequence: Synthetic polypeptide
  REGION 1..217: note = Synthetic Construct
APELLGGPSVFLFPPKPKDTLMISRTPEVTCVVVDVSHEDPEVKFNWYVDGVEVHNAKTKPREEQYNSTYRVVSVLTVLHQDWLNGKEYKCKVSNKALPAPIEKTISKAKGQPREPQVYTLPPSRDELTKNQVSLSCAVKGFYPSDIAVEWESYGTEWSNYKTTPPVLDSDGSFFLVSKLTVSKEEWQQGFVFSCSVLHEALHSHYTQKSLSLSPGK

SEQ ID NO: 2499 - protein, 217 aa, synthetic construct
  REGION 1..217: note = Description of Artificial Sequence: Synthetic polypeptide
  REGION 1..217: note = Synthetic Construct
APEAAGGPSVFLFPPKPKDTLMISRTPEVTCVVVDVSHEDPEVKFNWYVDGVEVHNAKTKPREEQYNSTYRVVSVLTVLHQDWLNGKEYKCKVSNKALPAPIEKTISKAKGQPREPQVYTLPPSRDELTKNQVSLSCAVKGFYPSDIAVEWESYGTEWSNYKTTPPVLDSDGSFFLVSKLTVSKEEWQQGFVFSCSVLHEALHSHYTQKSLSLSPGK

SEQ ID NO: 2500 - protein, 217 aa, synthetic construct
  REGION 1..217: note = Description of Artificial Sequence: Synthetic polypeptide
  REGION 1..217: note = Synthetic Construct
APEAAGGPSVFLFPPKPKDTLMISRTPEVTCVVVDVSHEDPEVKFNWYVDGVEVHNAKTKPREEQYNSTYRVVSVLTVLHQDWLNGKEYKCKVSNKALGAPIEKTISKAKGQPREPQVYTLPPSRDELTKNQVSLSCAVKGFYPSDIAVEWESYGTEWSNYKTTPPVLDSDGSFFLVSKLTVSKEEWQQGFVFSCSVLHEALHSHYTQKSLSLSPGK

SEQ ID NO: 2501 - protein, 217 aa, synthetic construct
  REGION 1..217: note = Description of Artificial Sequence: Synthetic polypeptide
  REGION 1..217: note = Synthetic Construct
APELLGGPSVFLFPPKPKDTLMISRTPEVTCVVVDVSHEDPEVKFNWYVDGVEVHNAKTKPREEQYNSTYRVVSVLTVLHQDWLNGKEYKCKVSNKALPAPIEKTISKAKGQPREPQVYTLPPSRDELTKNQVSLSCAVKGFYPSDIAVEWESNGQPENNYKTTPPVLDSDGSFFLVSKLTVDKSRWQQGNVFSCSVLHEALHSHYTQKSLSLSPGK

SEQ ID NO: 2502 - protein, 217 aa, synthetic construct
  REGION 1..217: note = Description of Artificial Sequence: Synthetic polypeptide
  REGION 1..217: note = Synthetic Construct
APEAAGGPSVFLFPPKPKDTLMISRTPEVTCVVVDVSHEDPEVKFNWYVDGVEVHNAKTKPREEQYNSTYRVVSVLTVLHQDWLNGKEYKCKVSNKALPAPIEKTISKAKGQPREPQVYTLPPSRDELTKNQVSLSCAVKGFYPSDIAVEWESNGQPENNYKTTPPVLDSDGSFFLVSKLTVDKSRWQQGNVFSCSVLHEALHSHYTQKSLSLSPGK

SEQ ID NO: 2503 - protein, 217 aa, synthetic construct
  REGION 1..217: note = Description of Artificial Sequence: Synthetic polypeptide
  REGION 1..217: note = Synthetic Construct
APELLGGPSVFLFPPKPKDTLMISRTPEVTCVVVDVSHEDPEVKFNWYVDGVEVHNAKTKPREEQYNSTYRVVSVLTVLHQDWLNGKEYKCKVSNKALPAPIEKTISKAKGQPREPQVYTLPPSRDELTKNQVSLWCLVKGFYPSDIAVEWESNGQPENNYKTTPPVLDSDGSFFLYSKLTVDKSRWQQGNVFSCSVLHEALHSHYTQKSLSLSPGK

SEQ ID NO: 2504 - protein, 217 aa, synthetic construct
  REGION 1..217: note = Description of Artificial Sequence: Synthetic polypeptide
  REGION 1..217: note = Synthetic Construct
APEAAGGPSVFLFPPKPKDTLMISRTPEVTCVVVDVSHEDPEVKFNWYVDGVEVHNAKTKPREEQYNSTYRVVSVLTVLHQDWLNGKEYKCKVSNKALPAPIEKTISKAKGQPREPQVYTLPPSRDELTKNQVSLWCLVKGFYPSDIAVEWESNGQPENNYKTTPPVLDSDGSFFLYSKLTVDKSRWQQGNVFSCSVLHEALHSHYTQKSLSLSPGK

SEQ ID NO: 2505 - protein, 193 aa, synthetic construct
  REGION 1..193: note = Description of Artificial Sequence: Synthetic polypeptide
  REGION 1..193: note = Synthetic Construct
MPALLSLVSLLSVLLMGCVAETGGSGHHHHHHSGTHNTTVFQGVAGQSLQVSCPYDSMKHWGRRKAWCRQLGEKGPCQRVVSTHNLWLLSFLRRWNGSTAITDDTLGGTLTITLRNLQPHDAGLYQCQSLHGSEADTLRKVLVEVLADPLDHRDAGDLWFPGESESFEDAHVEHSISRSLLEGEIPFPPTSAS

SEQ ID NO: 2506 - protein, 119 aa, synthetic construct
  REGION 1..119: note = Description of Artificial Sequence: Synthetic polypeptide
EVQLLESGGGLVQPGGSLRLSCAASGFTFSNYYMAWVRQAPGKGLEWVSSLTNSGGSTYYADSVKGRFTISRDNSKNTLYLQMNSLRAEDTAVYYCTREWAGSGYFDYWGQGTLVTVSS

SEQ ID NO: 2507 - protein, 107 aa, synthetic construct
  REGION 1..107: note = Description of Artificial Sequence: Synthetic polypeptide
DIQMTQSPSSLSASVGDRVTITCKASQNVGNNLAWYQQKPGKAPKLLIYYTSNRFTGVPSRFSGSGSGTDFTLTISSLQPEDFATYYCQRIYNSPWTFGQGTKLEIK

SEQ ID NO: 2508 - protein, 119 aa, synthetic construct; identical to SEQ ID NO: 2506
  REGION 1..119: note = Description of Artificial Sequence: Synthetic polypeptide

SEQ ID NO: 2509 - protein, 107 aa, synthetic construct
  REGION 1..107: note = Description of Artificial Sequence: Synthetic polypeptide
DIQMTQSPSSLSASVGDRVTMTCKASQNVGNNLAWYQQKPGKAPKLLLYYTSNRFTGVPSRFSGSGSGTDFTLTISSVQPEDFATYYCQRIYNSPWTFGQGTKLELK

SEQ ID NO: 2510 - protein, 119 aa, synthetic construct
  REGION 1..119: note = Description of Artificial Sequence: Synthetic polypeptide
EVQLLESGGGLVQPGGSLRLSCAASGFTFSNYYMAWVRQAPGKGLEWVASLTNSGGSTYYADSVKGRFTLSRDNSKNTLYLQMNSLRAEDTAVYYCTREWAGSGYFDYWGQGTLVTVSS

SEQ ID NO: 2511 - protein, 107 aa, synthetic construct; identical to SEQ ID NO: 2507
  REGION 1..107: note = Description of Artificial Sequence: Synthetic polypeptide

SEQ ID NO: 2512 - protein, 119 aa, synthetic construct
  REGION 1..119: note = Description of Artificial Sequence: Synthetic polypeptide
EVQLLESGGGLVQPGGSLRLSCAASGFTFSNYYMAWVRQAPGKGLEWVSSLTNSGGSTYYADSVKGRFTISRDNSKNTLYLQMNSLRAEDTAVYYCAKEWAGSGYFDYWGQGTLVTVSS

SEQ ID NO: 2513 - protein, 107 aa, synthetic construct; identical to SEQ ID NO: 2507
  REGION 1..107: note = Description of Artificial Sequence: Synthetic polypeptide

SEQ ID NO: 2514 - protein, 7 aa, synthetic construct
  REGION 1..7: note = Description of Artificial Sequence: Synthetic peptide
FSNYYMA

SEQ ID NO: 2515 - protein, 10 aa, synthetic construct
  REGION 1..10: note = Description of Artificial Sequence: Synthetic peptide
SLTNSGGSTY

SEQ ID NO: 2516 - protein, 7 aa, synthetic construct
  REGION 1..7: note = Description of Artificial Sequence: Synthetic peptide
EWAGSGY

SEQ ID NO: 2517 - protein, 7 aa, synthetic construct
  REGION 1..7: note = Description of Artificial Sequence: Synthetic peptide
NVGNNLA

SEQ ID NO: 2518 - protein, 7 aa, synthetic construct
  REGION 1..7: note = Description of Artificial Sequence: Synthetic peptide
YTSNRFT

SEQ ID NO: 2519 - protein, 7 aa, synthetic construct
  REGION 1..7: note = Description of Artificial Sequence: Synthetic peptide
RIYNSPW

SEQ ID NO: 2520 - DNA, 693 bp, Homo sapiens
  source 1..693: mol_type = genomic DNA
atggagcctctccggctgctcatcttactctttgtcacagagctgtccggagcccacaacaccacagtgttccagggcgtggcgggccagtccctgcaggtgtcttgcccctatgactccatgaagcactgggggaggcgcaaggcctggtgccgccagctgggagagaagggcccatgccagcgtgtggtcagcacgcacaacttgtggctgctgtccttcctgaggaggtggaatgggagcacagccatcacagacgataccctgggtggcactctcaccattacgctgcggaatctacaaccccatgatgcgggtctctaccagtgccagagcctccatggcagtgaggctgacaccctcaggaaggtcctggtggaggtgctggcagaccccctggatcaccgggatgctggagatctctggttccccggggagtctgagagcttcgaggatgcccatgtggagcacagcatctccaggagcctcttggaaggagaaatccccttcccacccacttccatccttctcctcctggcctgcatctttctcatcaagattctagcagccagcgccctctgggctgcagcctggcatggacagaagccagggacacatccacccagtgaactggactgtggccatgacccagggtatcagctccaaactctgccagggctgagagacacgtga

SEQ ID NO: 2521 - protein, 227 aa, Mus musculus; identical to SEQ ID NO: 822

SEQ ID NO: 2522 - protein, 119 aa, synthetic construct; identical to SEQ ID NO: 2512
  REGION 1..119: note = Description of Artificial Sequence: Synthetic polypeptide

SEQ ID NO: 2523 - protein, 119 aa, synthetic construct; identical to SEQ ID NO: 2506
  REGION 1..119: note = Description of Artificial Sequence: Synthetic polypeptide

SEQ ID NO: 2524 - protein, 119 aa, synthetic construct; identical to SEQ ID NO: 2510
  REGION 1..119: note = Description of Artificial Sequence: Synthetic polypeptide

SEQ ID NO: 2525 - protein, 109 aa, synthetic construct
  REGION 1..109: note = Description of Artificial Sequence: Synthetic polypeptide
EVQLLESGGGLVQPGGSLRLSCAASGFTFSSYAMSWVRQAPGKGLEWVSAISGSGGSTYYADSVKGRFTISRDNSKNTLYLQMNSLRAEDTAVYYCAKWGQGTLVTVSS

SEQ ID NO: 2526 - protein, 107 aa, synthetic construct; identical to SEQ ID NO: 2507
  REGION 1..107: note = Description of Artificial Sequence: Synthetic polypeptide

SEQ ID NO: 2527 - protein, 107 aa, synthetic construct; identical to SEQ ID NO: 2509
  REGION 1..107: note = Description of Artificial Sequence: Synthetic polypeptide

SEQ ID NO: 2528 - protein, 106 aa, synthetic construct
  REGION 1..106: note = Description of Artificial Sequence: Synthetic polypeptide
DIQMTQSPSSLSASVGDRVTITCRASQSISSYLNWYQQKPGKAPKLLIYAASSLQSGVPSRFSGSGSGTDFTLTISSLQPEDFATYYCQQSYSTPPFGQGTKLEIK

SEQ ID NO: 2529 - protein, 449 aa, synthetic construct
  REGION 1..449: note = Description of Artificial Sequence: Synthetic polypeptide
EVQLLESGGGLVQPGGSLRLSCAASGFTFSNYYMAWVRQAPGKGLEWVSSLTNSGGSTYYADSVKGRFTISRDNSKNTLYLQMNSLRAEDTAVYYCTREWAGSGYFDYWGQGTLVTVSSASTKGPSVFPLAPSSKSTSGGTAALGCLVKDYFPEPVTVSWNSGALTSGVHTFPAVLQSSGLYSLSSVVTVPSSSLGTQTYICNVNHKPSNTKVDKKVEPKSCDKTHTCPPCPAPELLGGPSVFLFPPKPKDTLMISRTPEVTCVVVDVSHEDPEVKFNWYVDGVEVHNAKTKPREEQYNSTYRVVSVLTVLHQDWLNGKEYKCKVSNKALPAPIEKTISKAKGQPREPQVYTLPPSRDELTKNQVSLTCLVKGFYPSDIAVEWESNGQPENNYKTTPPVLDSDGSFFLYSKLTVDKSRWQQGNVFSCSVMHEALHNHYTQKSLSLSPGK

SEQ ID NO: 2530 - protein, 214 aa, synthetic construct
  REGION 1..214: note = Description of Artificial Sequence: Synthetic polypeptide
DIQMTQSPSSLSASVGDRVTITCKASQNVGNNLAWYQQKPGKAPKLLIYYTSNRFTGVPSRFSGSGSGTDFTLTISSLQPEDFATYYCQRIYNSPWTFGQGTKLEIKRTVAAPSVFIFPPSDEQLKSGTASVVCLLNNFYPREAKVQWKVDNALQSGNSQESVTEQDSKDSTYSLSSTLTLSKADYEKHKVYACEVTHQGLSSPVTKSFNRGEC

SEQ ID NO: 2531 - protein, 449 aa, synthetic construct; identical to SEQ ID NO: 2529
  REGION 1..449: note = Description of Artificial Sequence: Synthetic polypeptide

SEQ ID NO: 2532 - protein, 214 aa, synthetic construct
  REGION 1..214: note = Description of Artificial Sequence: Synthetic polypeptide
DIQMTQSPSSLSASVGDRVTMTCKASQNVGNNLAWYQQKPGKAPKLLLYYTSNRFTGVPSRFSGSGSGTDFTLTISSVQPEDFATYYCQRIYNSPWTFGQGTKLELKRTVAAPSVFIFPPSDEQLKSGTASVVCLLNNFYPREAKVQWKVDNALQSGNSQESVTEQDSKDSTYSLSSTLTLSKADYEKHKVYACEVTHQGLSSPVTKSFNRGEC

SEQ ID NO: 2533 - protein, 449 aa, synthetic construct
  REGION 1..449: note = Description of Artificial Sequence: Synthetic polypeptide
EVQLLESGGGLVQPGGSLRLSCAASGFTFSNYYMAWVRQAPGKGLEWVASLTNSGGSTYYADSVKGRFTLSRDNSKNTLYLQMNSLRAEDTAVYYCTREWAGSGYFDYWGQGTLVTVSSASTKGPSVFPLAPSSKSTSGGTAALGCLVKDYFPEPVTVSWNSGALTSGVHTFPAVLQSSGLYSLSSVVTVPSSSLGTQTYICNVNHKPSNTKVDKKVEPKSCDKTHTCPPCPAPELLGGPSVFLFPPKPKDTLMISRTPEVTCVVVDVSHEDPEVKFNWYVDGVEVHNAKTKPREEQYNSTYRVVSVLTVLHQDWLNGKEYKCKVSNKALPAPIEKTISKAKGQPREPQVYTLPPSRDELTKNQVSLTCLVKGFYPSDIAVEWESNGQPENNYKTTPPVLDSDGSFFLYSKLTVDKSRWQQGNVFSCSVMHEALHNHYTQKSLSLSPGK

SEQ ID NO: 2534 - protein, 214 aa, synthetic construct; identical to SEQ ID NO: 2530
  REGION 1..214: note = Description of Artificial Sequence: Synthetic polypeptide

SEQ ID NO: 2535 - protein, 449 aa, synthetic construct
  REGION 1..449: note = Description of Artificial Sequence: Synthetic polypeptide
EVQLLESGGGLVQPGGSLRLSCAASGFTFSNYYMAWVRQAPGKGLEWVSSLTNSGGSTYYADSVKGRFTISRDNSKNTLYLQMNSLRAEDTAVYYCAKEWAGSGYFDYWGQGTLVTVSSASTKGPSVFPLAPSSKSTSGGTAALGCLVKDYFPEPVTVSWNSGALTSGVHTFPAVLQSSGLYSLSSVVTVPSSSLGTQTYICNVNHKPSNTKVDKKVEPKSCDKTHTCPPCPAPELLGGPSVFLFPPKPKDTLMISRTPEVTCVVVDVSHEDPEVKFNWYVDGVEVHNAKTKPREEQYNSTYRVVSVLTVLHQDWLNGKEYKCKVSNKALPAPIEKTISKAKGQPREPQVYTLPPSRDELTKNQVSLTCLVKGFYPSDIAVEWESNGQPENNYKTTPPVLDSDGSFFLYSKLTVDKSRWQQGNVFSCSVMHEALHNHYTQKSLSLSPGK

SEQ ID NO: 2536 - protein, 214 aa, synthetic construct; identical to SEQ ID NO: 2530
  REGION 1..214: note = Description of Artificial Sequence: Synthetic polypeptide

SEQ ID NO: 2537 - protein, 451 aa, synthetic construct
  REGION 1..451: note = Description of Artificial Sequence: Synthetic polypeptide
EVQLVESGGGLVQPGRSLKLSCAASGFTFSNYYMAWVRQAPTKGLEWVASLTNSGGSTYYRDSVKGRFTLSRDNAKSTLYLQMDSLRSEDTATYYCTREWAGSGYFDYWGQGVMVTVSSAQTTAPSVYPLAPGCGDTTSSTVTLGCLVKGYFPEPVTVTWNSGALSSDVHTFPAVLQSGLYTLTSSVTSSTWPSQTVTCNVAHPASSTKVDKKVERRDGGIGHKCPTCPTCHKCPVPELLGGPSVFLFPPKPKDILLLSQNAKVTCVVVDVSEEEPDVQFSWFVNNVEVHTAQTQPREEQYNSTFRVVSALPLQHQDWMSGKEFKCKVNNKALPSPIEKTLSKPKGLVRKPQVYVMGPPTEQLTEQTVSLTCLTSGFLPNDIGVEWTSNGHIEKNYKNTEPVMDSDGSFFMYSKLNVERSRWDSRAPFVCSVVHEGLHNHHVEKSLSRPPG

SEQ ID NO: 2538 - protein, 214 aa, synthetic construct
  REGION 1..214: note = Description of Artificial Sequence: Synthetic polypeptide
NIVMTQSPKSMSLSVGDRVTMNCKASQNVGNNLAWYQQKPGQSPKLLLYYTSNRFTGVPDRFTGGGYGTDFTLTINSVQAEDAAFYYCQRIYNSPWTFGGGTKLELKRADAAPTVSIFPPSTEQLATGGASVVCLMNNFYPRDISVKWKIDGTERRDGVLDSVTDQDSKDSTYSMSSTLSLTKADYESHNLYTCEVVHKTSSSPVVKSFNRNEC

SEQ ID NO: 2539 - protein, 112 aa, synthetic construct
  REGION 1..112: note = Description of Artificial Sequence: Synthetic polypeptide
  REGION 1..112: note = SYNTHESIZED
DVVMTQTPLSLPVSLGDQAFISCRSSQNLVHSNGNTYLHWYLQKPGQSPKLLIYIVSNRFSGVPDRFSGSGSGTDFTLEISRVEAEDLGVYFCSQSTHVPLTFGAGTKLELK

SEQ ID NO: 2540 - protein, 116 aa, synthetic construct
  REGION 1..116: note = Description of Artificial Sequence: Synthetic polypeptide
  REGION 1..116: note = SYNTHESIZED
EVQLQQSGPDLVKPGASVKMSCKASGYTFTDYNIHWVKQSHGKTLEWIGYINPNTGGTYYNQKFKGKATMTVNKSSSTAYMELRSLTSEDSAVYYCVATRWDGVNWAQGTLVTVSA

SEQ ID NO: 2541 - protein, 11 aa, synthetic construct
  REGION 1..11: note = Description of Artificial Sequence: Synthetic peptide
  REGION 1..11: note = SYNTHESIZED
QNLVHSNGNTY

SEQ ID NO: 2542 - protein, 9 aa, synthetic construct
  REGION 1..9: note = Description of Artificial Sequence: Synthetic peptide
  REGION 1..9: note = SYNTHESIZED
SQSTHVPLT

SEQ ID NO: 2543 - protein, 8 aa, synthetic construct
  REGION 1..8: note = Description of Artificial Sequence: Synthetic peptide
  REGION 1..8: note = SYNTHESIZED
GYTFTDYN

SEQ ID NO: 2544 - protein, 8 aa, synthetic construct
  REGION 1..8: note = Description of Artificial Sequence: Synthetic peptide
  REGION 1..8: note = SYNTHESIZED
INPNTGGT

SEQ ID NO: 2545 - protein, 9 aa, synthetic construct
  REGION 1..9: note = Description of Artificial Sequence: Synthetic peptide
  REGION 1..9: note = SYNTHESIZED
VATRWDGVN

SEQ ID NO: 2546 - protein, 112 aa, synthetic construct; identical to SEQ ID NO: 1636
  REGION 1..112: note = Description of Artificial Sequence: Synthetic polypeptide
  REGION 1..112: note = SYNTHESIZED

SEQ ID NO: 2547 - protein, 116 aa, synthetic construct
  REGION 1..116: note = Description of Artificial Sequence: Synthetic polypeptide
  REGION 1..116: note = SYNTHESIZED
EVQLQQSGAELVKPGASVKLSCTSSGFNIKGYYIHWVKQRTEQGLEWIGRIDPEDGETKNAPKFQGKATFGTDTFSNTAYLRLSSLTSEDTGVYYCVRTETRGAYWGPGTLVTVSA

SEQ ID NO: 2548 - protein, 11 aa, synthetic construct
  REGION 1..11: note = Description of Artificial Sequence: Synthetic peptide
  REGION 1..11: note = SYNTHESIZED
QSLVHSNGNTY

SEQ ID NO: 2549 - protein, 9 aa, synthetic construct
  REGION 1..9: note = Description of Artificial Sequence: Synthetic peptide
  REGION 1..9: note = SYNTHESIZED
SQSTHVPLT

SEQ ID NO: 2550 - protein, 8 aa, synthetic construct
  REGION 1..8: note = Description of Artificial Sequence: Synthetic peptide
  REGION 1..8: note = SYNTHESIZED
GFNIKGYY

SEQ ID NO: 2551 - protein, 8 aa, synthetic construct
  REGION 1..8: note = Description of Artificial Sequence: Synthetic peptide
  REGION 1..8: note = SYNTHESIZED
IDPEDGET

SEQ ID NO: 2552 - protein, 9 aa, synthetic construct
  REGION 1..9: note = Description of Artificial Sequence: Synthetic peptide
  REGION 1..9: note = SYNTHESIZED
VRTETRGAY

SEQ ID NO: 2553 - protein, 112 aa, synthetic construct
  REGION 1..112: note = Description of Artificial Sequence: Synthetic polypeptide
  REGION 1..112: note = SYNTHESIZED
DVVMTQTPLSLPVSLGDQASISCRSSQSLVHSNGDTYLHWYLQKRGQSPKLLIYKVSNRFSGVPDRFSGSGSGTDFTLKISRVEAEDLGVYFCSQTTHVPLTFGAGTKLELK

SEQ ID NO: 2554 - protein, 116 aa, synthetic construct
  REGION 1..116: note = Description of Artificial Sequence: Synthetic polypeptide
  REGION 1..116: note = SYNTHESIZED
QVPLQQPGAEFVKPGASVKLSCKASAYTFTRYWMHWVKQRPGRGLEWIGRIDPNSGGTNYNEKFKSKATFTVDKPSSTSYMQLSSLTSEDSAVYFCVFTGTLFDYWGQGTTLTVSS

SEQ ID NO: 2555 - protein, 11 aa, synthetic construct
  REGION 1..11: note = Description of Artificial Sequence: Synthetic peptide
  REGION 1..11: note = SYNTHESIZED
QSLVHSNGDTY

SEQ ID NO: 2556 - protein, 9 aa, synthetic construct
  REGION 1..9: note = Description of Artificial Sequence: Synthetic peptide
  REGION 1..9: note = SYNTHESIZED
SQTTHVPLT

SEQ ID NO: 2557 - protein, 8 aa, synthetic construct
  REGION 1..8: note = Description of Artificial Sequence: Synthetic peptide
  REGION 1..8: note = SYNTHESIZED
AYTFTRYW

SEQ ID NO: 2558 - protein, 8 aa, synthetic construct
  REGION 1..8: note = Description of Artificial Sequence: Synthetic peptide
  REGION 1..8: note = SYNTHESIZED
IDPNSGGT

SEQ ID NO: 2559 - protein, 9 aa, synthetic construct
  REGION 1..9: note = Description of Artificial Sequence: Synthetic peptide
  REGION 1..9: note = VFTGTLFDY
VFTGTLFDY

SEQ ID NO: 2560 - protein, 112 aa, synthetic construct
  REGION 1..112: note = Description of Artificial Sequence: Synthetic polypeptide
  REGION 1..112: note = SYNTHESIZED
DVVMTQTPLSLPVSLGDQASISCKSSQSLVHSNGNTYLHWYLQKPGQSPKLLIYKVSNRFSGVPDRFSGSGSGTDFTLKISRVEAEDLGVYFCSQSTHVPPTFGGGTKLEIK

SEQ ID NO: 2561 - protein, 120 aa, synthetic construct
  REGION 1..120: note = Description of Artificial Sequence: Synthetic polypeptide
  REGION 1..120: note = SYNTHESIZED
EVQLQHSGPVLVKPGASVKMSCKSSGYTFTDYYLNWVKQSHGKSPEWIGVINPNTGSTSYNQKFKGKATLTVDKSSSTAYMDLNSLTSEDSAVYYCATHYYGSIYKQAWFAYWGQGTLVT

SEQ ID NO: 2562 - protein, 11 aa, synthetic construct
  REGION 1..11: note = Description of Artificial Sequence: Synthetic peptide
  REGION 1..11: note = SYNTHESIZED
QSLVHSNGNTY

SEQ ID NO: 2563 - protein, 9 aa, synthetic construct
  REGION 1..9: note = Description of Artificial Sequence: Synthetic peptide
  REGION 1..9: note = SYNTHESIZED
SQSTHVPPT

SEQ ID NO: 2564 - protein, 8 aa, synthetic construct
  REGION 1..8: note = Description of Artificial Sequence: Synthetic peptide
  REGION 1..8: note = SYNTHESIZED
GYTFTDYY

SEQ ID NO: 2565 - protein, 8 aa, synthetic construct
  REGION 1..8: note = Description of Artificial Sequence: Synthetic peptide
  REGION 1..8: note = SYNTHESIZED
INPNTGST

SEQ ID NO: 2566 - protein, 16 aa, synthetic construct
  REGION 1..16: note = Description of Artificial Sequence: Synthetic peptide
  REGION 1..16: note = SYNTHESIZED
ATHYYGSIYKQAWFAY

SEQ ID NO: 2567 - protein, 112 aa, synthetic construct
  REGION 1..112: note = Description of Artificial Sequence: Synthetic polypeptide
  REGION 1..112: note = SYNTHESIZED
DVVMTQTPLSLPVSLGDQASISCKSSQSLVHSNGNTYLHWYLQKPGQSPKLLIYKVSNRFSGVPDRFSGSGSGTDFTLKISRVEAEDLGIYFCSQSTHVPPTFGGGTKLEIK

SEQ ID NO: 2568 - protein, 121 aa, synthetic construct
  REGION 1..121: note = Description of Artificial Sequence: Synthetic polypeptide
  REGION 1..121: note = SYNTHESIZED
EVQLQHSGPVLVKPGASVKMSCKASGYTFTDYYMNWVKQSHGKSPEWIGVINPNTGSTSYNQKFKGKATLTVDKSSSTAYMDLNSLTSEDSAVYYCATHYYGSIYKQAWFAYWGQGTLVTV

SEQ ID NO: 2569 - protein, 11 aa, synthetic construct
  REGION 1..11: note = Description of Artificial Sequence: Synthetic peptide
  REGION 1..11: note = SYNTHESIZED
QSLVHSNGNTY

SEQ ID NO: 2570 - protein, 9 aa, synthetic construct
  REGION 1..9: note = Description of Artificial Sequence: Synthetic peptide
  REGION 1..9: note = SYNTHESIZED
SQSTHVPPT

SEQ ID NO: 2571 - protein, 8 aa, synthetic construct
  REGION 1..8: note = Description of Artificial Sequence: Synthetic peptide
  REGION 1..8: note = SYNTHESIZED
GYTFTDYY

SEQ ID NO: 2572 - protein, 8 aa, synthetic construct
  REGION 1..8: note = Description of Artificial Sequence: Synthetic peptide
  REGION 1..8: note = SYNTHESIZED
INPNTGST

SEQ ID NO: 2573 - protein, 16 aa, synthetic construct
  REGION 1..16: note = Description of Artificial Sequence: Synthetic peptide
  REGION 1..16: note = SYNTHESIZED
ATHYYGSIYKQAWFAY

SEQ ID NO: 2574 - protein, 113 aa, synthetic construct
  REGION 1..113: note = Description of Artificial Sequence: Synthetic polypeptide
  REGION 1..113: note = SYNTHESIZED
DIVMSQSPSSLAVSVGEKVTMSCKSSQSLLYSSNLKNYLAWFQQKPGQSPKLLIYWASIRESGVPDRFTGSGSGTDFTLTINSVKAEDLAVYYCQQYYTFPLTFGAGTKLELK

SEQ ID NO: 2575 - protein, 119 aa, synthetic construct
  REGION 1..119: note = Description of Artificial Sequence: Synthetic polypeptide
  REGION 1..119: note = SYNTHESIZED
EVQLVETGGGLVQPKGSLKLSCAASGFSFNINAMHWVRQAPGTGLKWVARIRSGSNDFATYYADSVKDRFTISRDDSHSMLYLQMNNLKTEDTAIYFCVREYVNYFVHWGQGTLVTVSA

SEQ ID NO: 2576 - protein, 12 aa, synthetic construct
  REGION 1..12: note = Description of Artificial Sequence: Synthetic peptide
  REGION 1..12: note = SYNTHESIZED
QSLLYSSNLKNY

SEQ ID NO: 2577 - protein, 9 aa, synthetic construct
  REGION 1..9: note = Description of Artificial Sequence: Synthetic peptide
  REGION 1..9: note = SYNTHESIZED
QQYYTFPLT

SEQ ID NO: 2578 - protein, 8 aa, synthetic construct
  REGION 1..8: note = Description of Artificial Sequence: Synthetic peptide
  REGION 1..8: note = SYNTHESIZED
GFSFNINA

SEQ ID NO: 2579 - protein, 10 aa, synthetic construct
  REGION 1..10: note = Description of Artificial Sequence: Synthetic peptide
  REGION 1..10: note = SYNTHESIZED
IRSGSNDFAT

SEQ ID NO: 2580 - protein, 10 aa, synthetic construct
  REGION 1..10: note = Description of Artificial Sequence: Synthetic peptide
  REGION 1..10: note = SYNTHESIZED
VREYVNYFVH

SEQ ID NO: 2581 - protein, 14 aa, synthetic construct
  REGION 1..14: note = Description of Artificial Sequence: Synthetic peptide
  REGION 1..14: note = SYNTHESIZED
DHRDAGDLWFPGES

SEQ ID NO: 2582 - protein, 11 aa, synthetic construct
  REGION 1..11: note = Description of Artificial Sequence: Synthetic peptide
  REGION 1..11: note = SYNTHESIZED
  MOD_RES 2: note = Ser, Thr, Asn, or Gln
  MOD_RES 9: note = Asp or Asn
QXLVHSNGXTY

SEQ ID NO: 2583 - protein, 9 aa, synthetic construct
  REGION 1..9: note = Description of Artificial Sequence: Synthetic peptide
  REGION 1..9: note = SYNTHESIZED
  MOD_RES 3: note = Ser, Thr, Asn, or Gln
  MOD_RES 8: note = Pro or Leu
SQXTHVPXT

SEQ ID NO: 2584 - protein, 219 aa, Homo sapiens; identical to SEQ ID NO: 1926

SEQ ID NO: 2585 - protein, 222 aa, Homo sapiens; identical to SEQ ID NO: 1927

SEQ ID NO: 2586 - protein, 10 aa, synthetic construct
  REGION 1..10: note = Description of Artificial Sequence: Synthetic peptide
GYTFTGYHMS

SEQ ID NO: 2587 - protein, 17 aa, synthetic construct
  REGION 1..17: note = Description of Artificial Sequence: Synthetic peptide
VINPVSGNTVYAQKFQG

SEQ ID NO: 2588 - protein, 10 aa, synthetic construct
  REGION 1..10: note = Description of Artificial Sequence: Synthetic peptide
IPSYTYAFDY

SEQ ID NO: 2589 - protein, 5 aa, synthetic construct
  REGION 1..5: note = Description of Artificial Sequence: Synthetic peptide
GYHMS

SEQ ID NO: 2590 - protein, 7 aa, synthetic construct
  REGION 1..7: note = Description of Artificial Sequence: Synthetic peptide
GYTFTGY

SEQ ID NO: 2591 - protein, 6 aa, synthetic construct
  REGION 1..6: note = Description of Artificial Sequence: Synthetic peptide
NPVSGN

SEQ ID NO: 2592 - protein, 8 aa, synthetic construct
  REGION 1..8: note = Description of Artificial Sequence: Synthetic peptide
GYTFTGYH

SEQ ID NO: 2593 - protein, 8 aa, synthetic construct
  REGION 1..8: note = Description of Artificial Sequence: Synthetic peptide
INPVSGNT

SEQ ID NO: 2594 - protein, 12 aa, synthetic construct
  REGION 1..12: note = Description of Artificial Sequence: Synthetic peptide
ARIPSYTYAFDY

SEQ ID NO: 2595 - protein, 119 aa, synthetic construct
  REGION 1..119: note = Description of Artificial Sequence: Synthetic polypeptide
QVQLVQSGAEVKKPGASVKVSCKASGYTFTGYHMSWVRQAPGQGLEWMGVINPVSGNTVYAQKFQGRVTMTRDTSISTAYMELSRLRSEDTAVYYCARIPSYTYAFDYWGQGTLVTVSS

SEQ ID NO: 2596 - DNA, 357 bp, synthetic construct
  misc_feature 1..357: note = Description of Artificial Sequence: Synthetic polynucleotide
  source 1..357: mol_type = other DNA
caggtgcaattggtgcagagcggtgcggaagtgaaaaaaccgggtgccagcgtgaaagttagctgcaaagcgtccggatataccttcactggttaccatatgtcttgggtgcgccaggccccgggccagggcctcgagtggatgggcgttatcaacccggtttctggcaacacggtttacgcgcagaaatttcagggccgggtgaccatgacccgtgataccagcattagcaccgcgtatatggaactgagccgtctgcgtagcgaagatacggccgtgtattattgcgcgcgtatcccgtcttacacttacgctttcgattactggggccaaggcaccctggtgactgttagctca

SEQ ID NO: 2597 - protein, 449 aa, synthetic construct
  REGION 1..449: note = Description of Artificial Sequence: Synthetic polypeptide
QVQLVQSGAEVKKPGASVKVSCKASGYTFTGYHMSWVRQAPGQGLEWMGVINPVSGNTVYAQKFQGRVTMTRDTSISTAYMELSRLRSEDTAVYYCARIPSYTYAFDYWGQGTLVTVSSASTKGPSVFPLAPSSKSTSGGTAALGCLVKDYFPEPVTVSWNSGALTSGVHTFPAVLQSSGLYSLSSVVTVPSSSLGTQTYICNVNHKPSNTKVDKRVEPKSCDKTHTCPPCPAPEAAGGPSVFLFPPKPKDTLMISRTPEVTCVVVDVSHEDPEVKFNWYVDGVEVHNAKTKPREEQYNSTYRVVSVLTVLHQDWLNGKEYKCKVSNKALPAPIEKTISKAKGQPREPQVYTLPPSREEMTKNQVSLTCLVKGFYPSDIAVEWESNGQPENNYKTTPPVLDSDGSFFLYSKLTVDKSRWQQGNVFSCSVMHEALHNHYTQKSLSLSPGK

SEQ ID NO: 2598 - DNA, 1347 bp, synthetic construct
  misc_feature 1..1347: note = Description of Artificial Sequence: Synthetic polynucleotide
  source 1..1347: mol_type = other DNA
caggtgcaattggtgcagagcggtgcggaagtgaaaaaaccgggtgccagcgtgaaagttagctgcaaagcgtccggatataccttcactggttaccatatgtcttgggtgcgccaggccccgggccagggcctcgagtggatgggcgttatcaacccggtttctggcaacacggtttacgcgcagaaatttcagggccgggtgaccatgacccgtgataccagcattagcaccgcgtatatggaactgagccgtctgcgtagcgaagatacggccgtgtattattgcgcgcgtatcccgtcttacacttacgctttcgattactggggccaaggcaccctggtgactgttagctcagcctccaccaagggtccatcggtcttccccctggcaccctcctccaagagcacctctgggggcacagcggccctgggctgcctggtcaaggactacttccccgaaccggtgacggtgtcgtggaactcaggcgccctgaccagcggcgtgcacaccttcccggctgtcctacagtcctcaggactctactccctcagcagcgtggtgaccgtgccctccagcagcttgggcacccagacctacatctgcaacgtgaatcacaagcccagcaacaccaaggtggacaagagagttgagcccaaatcttgtgacaaaactcacacatgcccaccgtgcccagcacctgaagcagcggggggaccgtcagtcttcctcttccccccaaaacccaaggacaccctcatgatctcccggacccctgaggtcacatgcgtggtggtggacgtgagccacgaagaccctgaggtcaagttcaactggtacgtggacggcgtggaggtgcataatgccaagacaaagccgcgggaggagcagtacaacagcacgtaccgggtggtcagcgtcctcaccgtcctgcaccaggactggctgaatggcaaggagtacaagtgcaaggtctccaacaaagccctcccagcccccatcgagaaaaccatctccaaagccaaagggcagccccgagaaccacaggtgtacaccctgcccccatcccgggaggagatgaccaagaaccaggtcagcctgacctgcctggtcaaaggcttctatcccagcgacatcgccgtggagtgggagagcaatgggcagccggagaacaactacaagaccacgcctcccgtgctggactccgacggctccttcttcctctacagcaagctcaccgtggacaagagcaggtggcagcaggggaacgtcttctcatgctccgtgatgcatgaggctctgcacaaccactacacgcagaagagcctctccctgtctccgggtaaa

SEQ ID NO: 2599 - protein, 11 aa, synthetic construct
  REGION 1..11: note = Description of Artificial Sequence: Synthetic peptide
RASQDISNYLA

SEQ ID NO: 2600 - protein, 7 aa, synthetic construct
  REGION 1..7: note = Description of Artificial Sequence: Synthetic peptide
RASSLQS

SEQ ID NO: 2601 - protein, 10 aa, synthetic construct
  REGION 1..10: note = Description of Artificial Sequence: Synthetic peptide
FQYRHMPSQT

SEQ ID NO: 2602 - protein, 7 aa, synthetic construct
  REGION 1..7: note = Description of Artificial Sequence: Synthetic peptide
SQDISNY

SEQ ID NO: 2603 - skipped

SEQ ID NO: 2604 - protein, 7 aa, synthetic construct
  REGION 1..7: note = Description of Artificial Sequence: Synthetic peptide
YRHMPSQ

SEQ ID NO: 2605 - protein, 6 aa, synthetic construct
  REGION 1..6: note = Description of Artificial Sequence: Synthetic peptide
QDISNY

SEQ ID NO: 2606 - protein, 108 aa, synthetic construct
  REGION 1..108: note = Description of Artificial Sequence: Synthetic polypeptide
DIQMTQSPSSLSASVGDRVTITCRASQDISNYLAWYQQKPGKAPKLLIYRASSLQSGVPSRFSGSGSGTDFTLTISSLQPEDFATYYCFQYRHMPSQTFGQGTKVEIK

SEQ ID NO: 2607 - DNA, 324 bp, synthetic construct
  misc_feature 1..324: note = Description of Artificial Sequence: Synthetic polynucleotide
  source 1..324: mol_type = other DNA
gatatccagatgacccagagcccgagcagcctgagcgccagcgtgggcgatcgcgtgaccattacctgcagagccagccaggacatttctaactacctggcttggtaccagcagaaaccgggcaaagcgccgaaactattaatctaccgtgcttcttctctgcaaagcggcgtgccgagccgctttagcggcagcggatccggcaccgatttcaccctgaccattagctctctgcaaccggaagactttgcgacctattattgcttccagtaccgtcatatgccgtctcagacctttggccagggcacgaaagttgaaattaaa

SEQ ID NO: 2608 - protein, 215 aa, synthetic construct
  REGION 1..215: note = Description of Artificial Sequence: Synthetic polypeptide
DIQMTQSPSSLSASVGDRVTITCRASQDISNYLAWYQQKPGKAPKLLIYRASSLQSGVPSRFSGSGSGTDFTLTISSLQPEDFATYYCFQYRHMPSQTFGQGTKVEIKRTVAAPSVFIFPPSDEQLKSGTASVVCLLNNFYPREAKVQWKVDNALQSGNSQESVTEQDSKDSTYSLSSTLTLSKADYEKHKVYACEVTHQGLSSPVTKSFNRGEC

SEQ ID NO: 2609 - DNA, 645 bp, synthetic construct
  misc_feature 1..645: note = Description of Artificial Sequence: Synthetic polynucleotide
  source 1..645: mol_type = other DNA
gatatccagatgacccagagcccgagcagcctgagcgccagcgtgggcgatcgcgtgaccattacctgcagagccagccaggacatttctaactacctggcttggtaccagcagaaaccgggcaaagcgccgaaactattaatctaccgtgcttcttctctgcaaagcggcgtgccgagccgctttagcggcagcggatccggcaccgatttcaccctgaccattagctctctgcaaccggaagactttgcgacctattattgcttccagtaccgtcatatgccgtctcagacctttggccagggcacgaaagttgaaattaaacgtacggtggccgctcccagcgtgttcatcttcccccccagcgacgagcagctgaagagcggcaccgccagcgtggtgtgcctgctgaacaacttctacccccgggaggccaaggtgcagtggaaggtggacaacgccctgcagagcggcaacagccaggaaagcgtcaccgagcaggacagcaaggactccacctacagcctgagcagcaccctgaccctgagcaaggccgactacgagaagcacaaggtgtacgcctgcgaggtgacccaccagggcctgtccagccccgtgaccaagagcttcaaccggggcgagtgt

SEQ ID NO: 2610 - DNA, 357 bp, synthetic construct
  misc_feature 1..357: note = Description of Artificial Sequence: Synthetic polynucleotide
  source 1..357: mol_type = other DNA
caagtgcaactcgtgcagtcaggagccgaagtcaagaagcctggagcctcggtcaaggtgtcctgcaaggccagcggatacactttcactggataccacatgtcgtgggtcagacaggctcctggccaagggctggagtggatgggcgtcatcaacccggtgtcgggtaataccgtgtacgcccagaagttccagggtcgcgtgaccatgacccgggatacctccattagcaccgcgtacatggagctcagccggttgagatccgaggataccgccgtgtactactgtgcgcggatcccgtcctacacttacgccttcgactattggggccaggggactcttgtcaccgtgtcctcg

SEQ ID NO: 2611 - protein, 449 aa, synthetic construct
  REGION 1..449: note = Description of Artificial Sequence: Synthetic polypeptide
QVQLVQSGAEVKKPGASVKVSCKASGYTFTGYHMSWVRQAPGQGLEWMGVINPVSGNTVYAQKFQGRVTMTRDTSISTAYMELSRLRSEDTAVYYCARIPSYTYAFDYWGQGTLVTVSSASTKGPSVFPLAPSSKSTSGGTAALGCLVKDYFPEPVTVSWNSGALTSGVHTFPAVLQSSGLYSLSSVVTVPSSSLGTQTYICNVNHKPSNTKVDKRVEPKSCDKTHTCPPCPAPELLGGPSVFLFPPKPKDTLMISRTPEVTCVVVDVSHEDPEVKFNWYVDGVEVHNAKTKPREEQYNSTYRVVSVLTVLHQDWLNGKEYKCKVSNKALPAPIEKTISKAKGQPREPQVYTLPPSREEMTKNQVSLTCLVKGFYPSDIAVEWESNGQPENNYKTTPPVLDSDGSFFLYSKLTVDKSRWQQGNVFSCSVMHEALHNHYTQKSLSLSPGK

SEQ ID NO: 2612 - DNA, 1347 bp, synthetic construct
  misc_feature 1..1347: note = Description of Artificial Sequence: Synthetic polynucleotide
  source 1..1347: mol_type = other DNA
caagtgcaactcgtgcagtcaggagccgaagtcaagaagcctggagcctcggtcaaggtgtcctgcaaggccagcggatacactttcactggataccacatgtcgtgggtcagacaggctcctggccaagggctggagtggatgggcgtcatcaacccggtgtcgggtaataccgtgtacgcccagaagttccagggtcgcgtgaccatgacccgggatacctccattagcaccgcgtacatggagctcagccggttgagatccgaggataccgccgtgtactactgtgcgcggatcccgtcctacacttacgccttcgactattggggccaggggactcttgtcaccgtgtcctcggcctccactaagggcccaagtgtgtttcccctggcccccagcagcaagtctacttccggcggaactgctgccctgggttgcctggtgaaggactacttccccgagcccgtgacagtgtcctggaactctggggctctgacttccggcgtgcacaccttccccgccgtgctgcagagcagcggcctgtacagcctgagcagcgtggtgacagtgccctccagctctctgggaacccagacctatatctgcaacgtgaaccacaagcccagcaacaccaaggtggacaagagagtggagcccaagagctgcgacaagacccacacctgccccccctgcccagctccagaactgctgggagggccttccgtgttcctgttcccccccaagcccaaggacaccctgatgatcagcaggacccccgaggtgacctgcgtggtggtggacgtgtcccacgaggacccagaggtgaagttcaactggtacgtggacggcgtggaggtgcacaacgccaagaccaagcccagagaggagcagtacaacagcacctacagggtggtgtccgtgctgaccgtgctgcaccaggactggctgaacggcaaagaatacaagtgcaaagtctccaacaaggccctgccagccccaatcgaaaagacaatcagcaaggccaagggccagccacgggagccccaggtgtacaccctgccccccagccgggaggagatgaccaagaaccaggtgtccctgacctgtctggtgaagggcttctaccccagcgatatcgccgtggagtgggagagcaacggccagcccgagaacaactacaagaccacccccccagtgctggacagcgacggcagcttcttcctgtacagcaagctgaccgtggacaagtccaggtggcagcagggcaacgtgttcagctgcagcgtgatgcacgaggccctgcacaaccactacacccagaagtccctgagcctgagccccggcaag

SEQ ID NO: 2613 - DNA, 324 bp, synthetic construct
  misc_feature 1..324: note = Description of Artificial Sequence: Synthetic polynucleotide
  source 1..324: mol_type = other DNA
gacattcagatgacccagtccccgtcgtccctgtccgcatccgtgggcgacagagtcaccatcacttgccgggcctcacaggatatttccaactacctggcctggtatcagcagaagcctggaaaggccccgaagctgctgatctaccgggcgtcctccttgcaatcgggagtgccaagccgcttttctggttccgggagcgggactgacttcaccctgactattagcagcctgcagcccgaagatttcgctacctactactgcttccagtaccggcacatgccctcacaaaccttcggacagggcaccaaagtcgagatcaag

SEQ ID NO: 2614 - DNA, 645 bp, synthetic construct
  misc_feature 1..645: note = Description of Artificial Sequence: Synthetic polynucleotide
  source 1..645: mol_type = other DNA
gacattcagatgacccagtccccgtcgtccctgtccgcatccgtgggcgacagagtcaccatcacttgccgggcctcacaggatatttccaactacctggcctggtatcagcagaagcctggaaaggccccgaagctgctgatctaccgggcgtcctccttgcaatcgggagtgccaagccgcttttctggttccgggagcgggactgacttcaccctgactattagcagcctgcagcccgaagatttcgctacctactactgcttccagtaccggcacatgccctcacaaaccttcggacagggcaccaaagtcgagatcaagcgtacggtggccgctcccagcgtgttcatcttcccccccagcgacgagcagctgaagagcggcaccgccagcgtggtgtgcctgctgaacaacttctacccccgggaggccaaggtgcagtggaaggtggacaacgccctgcagagcggcaacagccaggagagcgtcaccgagcaggacagcaaggactccacctacagcctgagcagcaccctgaccctgagcaaggccgactacgagaagcataaggtgtacgcctgcgaggtgacccaccagggcctgtccagccccgtgaccaagagcttcaacaggggcgagtgc

SEQ ID NO: 2615 - protein, 449 aa, synthetic construct
  REGION 1..449: note = Description of Artificial Sequence: Synthetic polypeptide
QVQLVQSGAEVKKPGASVKVSCKASGYTFTGYHMSWVRQAPGQGLEWMGVINPVSGNTVYAQKFQGRVTMTRDTSISTAYMELSRLRSEDTAVYYCARIPSYTYAFDYWGQGTLVTVSSASTKGPSVFPLAPSSKSTSGGTAALGCLVKDYFPEPVTVSWNSGALTSGVHTFPAVLQSSGLYSLSSVVTVPSSSLGTQTYICNVNHKPSNTKVDKRVEPKSCDKTHTCPPCPAPELLGGPSVFLFPPKPKDTLMISRTPEVTCVVVAVSHEDPEVKFNWYVDGVEVHNAKTKPREEQYNSTYRVVSVLTVLHQDWLNGKEYKCKVSNKALAAPIEKTISKAKGQPREPQVYTLPPSREEMTKNQVSLTCLVKGFYPSDIAVEWESNGQPENNYKTTPPVLDSDGSFFLYSKLTVDKSRWQQGNVFSCSVMHEALHNHYTQKSLSLSPGK

SEQ ID NO: 2616 - DNA, 1347 bp, synthetic construct
  misc_feature 1..1347: note = Description of Artificial Sequence: Synthetic polynucleotide
  source 1..1347: mol_type = other DNA
caagtgcaactcgtgcagtcaggagccgaagtcaagaagcctggagcctcggtcaaggtgtcctgcaaggccagcggatacactttcactggataccacatgtcgtgggtcagacaggctcctggccaagggctggagtggatgggcgtcatcaacccggtgtcgggtaataccgtgtacgcccagaagttccagggtcgcgtgaccatgacccgggatacctccattagcaccgcgtacatggagctcagccggttgagatccgaggataccgccgtgtactactgtgcgcggatcccgtcctacacttacgccttcgactattggggccaggggactcttgtcaccgtgtcctcggcctccactaagggcccgtcagtgttcccccttgcgccatcctcgaagtcaacctccggaggaactgccgcactgggttgcctcgtgaaagactatttcccggaacccgtcactgtctcctggaactcaggagcgctcaccagcggagtgcatacctttcctgcggtgctgcagtccagcggcctgtactccctgagctccgtcgtgaccgtcccctcgtcgtccctgggaacccaaacctacatttgcaacgtcaatcacaagccaagcaacactaaggtggacaagagagtggagcccaagtcctgcgataagacccacacctgtcctccctgtccggcacctgaactgcttggtggaccttccgtgttcctgttcccgcccaagccaaaagacaccctgatgatctcccgcactccggaagtcacttgcgtggtcgtggccgtgtcccacgaggaccccgaggtcaagtttaattggtacgtggacggagtggaagtgcacaacgccaagaccaagccgcgggaagaacagtacaactccacctaccgcgtggtgtccgtcctgactgtgctccaccaggactggctgaacggaaaggagtacaagtgcaaagtgtccaacaaggcactggctgcccctatcgaaaagactatctccaaggccaagggccaacctagggagccccaggtgtacacgttgcctccttcccgcgaagaaatgactaagaaccaggtgtcgctgacctgtctcgtgaaagggttctacccctctgacatcgccgtggaatgggagtcaaacggacagcctgagaacaactataagaccacaccacctgtcctggactccgacggctccttcttcctgtactcaaagttgaccgtggacaagtcgcggtggcaacagggcaacgtgttctcttgctccgtgatgcacgaagccctgcacaaccactacacccaaaagtcgctcagcctctcccccggaaag

SEQ ID NO: 2617 - protein, 449 aa, synthetic construct
  REGION 1..449: note = Description of Artificial Sequence: Synthetic polypeptide
QVQLVQSGAEVKKPGASVKVSCKASGYTFTGYHMSWVRQAPGQGLEWMGVINPVSGNTVYAQKFQGRVTMTRDTSISTAYMELSRLRSEDTAVYYCARIPSYTYAFDYWGQGTLVTVSSASTKGPSVFPLAPSSKSTSGGTAALGCLVKDYFPEPVTVSWNSGALTSGVHTFPAVLQSSGLYSLSSVVTVPSSSLGTQTYICNVNHKPSNTKVDKRVEPKSCDKTHTCPPCPAPELLGGPSVFLFPPKPKDTLMISRTPEVTCVVVDVSHEDPEVKFNWYVDGVEVHNAKTKPREEQYNSTYRVVSVLTVLHQDWLNGKEYKCKVSNKALPAPIEKTISKAKGQPREPQVYTLPPSREEMTKNQVSLTCLVKGFYPSDIAVEWESNGQPENNYKTTPPVLDSDGSFFLYSKLTVDKSRWQQGNVFSCSVLHEALHSHYTQKSLSLSPGK

SEQ ID NO: 2618 - DNA, 1347 bp, synthetic construct
  misc_feature 1..1347: note = Description of Artificial Sequence: Synthetic polynucleotide
  source 1..1347: mol_type = other DNA
caagtgcaactcgtgcagtcaggagccgaagtcaagaagcctggagcctcggtcaaggtgtcctgcaaggccagcggatacactttcactggataccacatgtcgtgggtcagacaggctcctggccaagggctggagtggatgggcgtcatcaacccggtgtcgggtaataccgtgtacgcccagaagttccagggtcgcgtgaccatgacccgggatacctccattagcaccgcgtacatggagctcagccggttgagatccgaggataccgccgtgtactactgtgcgcggatcccgtcctacacttacgccttcgactattggggccaggggactcttgtcaccgtgtcctcggcctccactaagggcccgtcagtgttcccccttgcgccatcctcgaagtcaacctccggaggaactgccgcactgggttgcctcgtgaaagactatttcccggaacccgtcactgtctcctggaactcaggagcgctcaccagcggagtgcatacctttcctgcggtgctgcagtccagcggcctgtactccctgagctccgtcgtgaccgtcccctcgtcgtccctgggaacccaaacctacatttgcaacgtcaatcacaagccaagcaacactaaggtggacaagagagtggagcccaagtcctgcgataagacccacacctgtcctccctgtccggcacctgaactgcttggtggaccttccgtgttcctgttcccgcccaagccaaaagacaccctgatgatctcccgcactccggaagtcacttgcgtggtcgtggacgtgtcccacgaggaccccgaggtcaagtttaattggtacgtggacggagtggaagtgcacaacgccaagaccaagccgcgggaagaacagtacaactccacctaccgcgtggtgtccgtcctgactgtgctccaccaggactggctgaacggaaaggagtacaagtgcaaagtgtccaacaaggcactgccagcccctatcgaaaagactatctccaaggccaagggccaacctagggagccccaggtgtacacgttgcctccttcccgcgaagaaatgactaagaaccaggtgtcgctgacctgtctcgtgaaagggttctacccctctgacatcgccgtggaatgggagtcaaacggacagcctgagaacaactataagaccacaccacctgtcctggactccgacggctccttcttcctgtactcaaagttgaccgtggacaagtcgcggtggcaacagggcaacgtgttctcttgctccgtgctgcacgaagccctgcacagccactacacccaaaagtcgctcagcctctcccccggaaag

SEQ ID NO: 2619 - protein, 449 aa, synthetic construct
  REGION 1..449: note = Description of Artificial Sequence: Synthetic polypeptide
QVQLVQSGAEVKKPGASVKVSCKASGYTFTGYHMSWVRQAPGQGLEWMGVINPVSGNTVYAQKFQGRVTMTRDTSISTAYMELSRLRSEDTAVYYCARIPSYTYAFDYWGQGTLVTVSSASTKGPSVFPLAPSSKSTSGGTAALGCLVKDYFPEPVTVSWNSGALTSGVHTFPAVLQSSGLYSLSSVVTVPSSSLGTQTYICNVNHKPSNTKVDKRVEPKSCDKTHTCPPCPAPELLGGPSVFLFPPKPKDTLMISRTPEVTCVVVAVSHEDPEVKFNWYVDGVEVHNAKTKPREEQYNSTYRVVSVLTVLHQDWLNGKEYKCKVSNKALAAPIEKTISKAKGQPREPQVYTLPPSREEMTKNQVSLTCLVKGFYPSDIAVEWESNGQPENNYKTTPPVLDSDGSFFLYSKLTVDKSRWQQGNVFSCSVLHEALHSHYTQKSLSLSPGK

SEQ ID NO: 2620 - DNA, 1347 bp, synthetic construct
  misc_feature 1..1347: note = Description of Artificial Sequence: Synthetic polynucleotide
  source 1..1347: mol_type = other DNA
caagtgcaactcgtgcagtcaggagccgaagtcaagaagcctggagcctcggtcaaggtgtcctgcaaggccagcggatacactttcactggataccacatgtcgtgggtcagacaggctcctggccaagggctggagtggatgggcgtcatcaacccggtgtcgggtaataccgtgtacgcccagaagttccagggtcgcgtgaccatgacccgggatacctccattagcaccgcgtacatggagctcagccggttgagatccgaggataccgccgtgtactactgtgcgcggatcccgtcctacacttacgccttcgactattggggccaggggactcttgtcaccgtgtcctcggcctccactaagggcccgtcagtgttcccccttgcgccatcctcgaagtcaacctccggaggaactgccgcactgggttgcctcgtgaaagactatttcccggaacccgtcactgtctcctggaactcaggagcgctcaccagcggagtgcatacctttcctgcggtgctgcagtccagcggcctgtactccctgagctccgtcgtgaccgtcccctcgtcgtccctgggaacccaaacctacatttgcaacgtcaatcacaagccaagcaacactaaggtggacaagagagtggagcccaagtcctgcgataagacccacacctgtcctccctgtccggcacctgaactgcttggtggaccttccgtgttcctgttcccgcccaagccaaaagacaccctgatgatctcccgcactccggaagtcacttgcgtggtcgtggccgtgtcccacgaggaccccgaggtcaagtttaattggtacgtggacggagtggaagtgcacaacgccaagaccaagccgcgggaagaacagtacaactccacctaccgcgtggtgtccgtcctgactgtgctccaccaggactggctgaacggaaaggagtacaagtgcaaagtgtccaacaaggcactggctgcccctatcgaaaagactatctccaaggccaagggccaacctagggagccccaggtgtacacgttgcctccttcccgcgaagaaatgactaagaaccaggtgtcgctgacctgtctcgtgaaagggttctacccctctgacatcgccgtggaatgggagtcaaacggacagcctgagaacaactataagaccacaccacctgtcctggactccgacggctccttcttcctgtactcaaagttgaccgtggacaagtcgcggtggcaacagggcaacgtgttctcttgctccgtgctgcacgaagccctgcacagccactacacccaaaagtcgctcagcctctcccccggaaag

SEQ ID NO: 2621 - protein, 449 aa, synthetic construct
  REGION 1..449: note = Description of Artificial Sequence: Synthetic polypeptide
QVQLVQSGAEVKKPGASVKVSCKASGYTFTGYHMSWVRQAPGQGLEWMGVINPVSGNTVYAQKFQGRVTMTRDTSISTAYMELSRLRSEDTAVYYCARIPSYTYAFDYWGQGTLVTVSSASTKGPSVFPLAPSSKSTSGGTAALGCLVKDYFPEPVTVSWNSGALTSGVHTFPAVLQSSGLYSLSSVVTVPSSSLGTQTYICNVNHKPSNTKVDKRVEPKSCDKTHTCPPCPAPELLGGPSVFLFPPKPKDTLYITREPEVTCVVVDVSHEDPEVKFNWYVDGVEVHNAKTKPREEQYNSTYRVVSVLTVLHQDWLNGKEYKCKVSNKALPAPIEKTISKAKGQPREPQVYTLPPSREEMTKNQVSLTCLVKGFYPSDIAVEWESNGQPENNYKTTPPVLDSDGSFFLYSKLTVDKSRWQQGNVFSCSVMHEALHNHYTQKSLSLSPGK

SEQ ID NO: 2622 - DNA, 1347 bp, synthetic construct
  misc_feature 1..1347: note = Description of Artificial Sequence: Synthetic polynucleotide
  source 1..1347: mol_type = other DNA
caagtgcaactcgtgcagtcaggagccgaagtcaagaagcctggagcctcggtcaaggtgtcctgcaaggccagcggatacactttcactggataccacatgtcgtgggtcagacaggctcctggccaagggctggagtggatgggcgtcatcaacccggtgtcgggtaataccgtgtacgcccagaagttccagggtcgcgtgaccatgacccgggatacctccattagcaccgcgtacatggagctcagccggttgagatccgaggataccgccgtgtactactgtgcgcggatcccgtcctacacttacgccttcgactattggggccaggggactcttgtcaccgtgtcctcggcctccactaagggcccgtcagtgttcccccttgcgccatcctcgaagtcaacctccggaggaactgccgcactgggttgcctcgtgaaagactatttcccggaacccgtcactgtctcctggaactcaggagcgctcaccagcggagtgcatacctttcctgcggtgctgcagtccagcggcctgtactccctgagctccgtcgtgaccgtcccctcgtcgtccctgggaacccaaacctacatttgcaacgtcaatcacaagccaagcaacactaaggtggacaagagagtggagcccaagtcctgcgataagacccacacctgtcctccctgtccggcacctgaactgcttggtggaccttccgtgttcctgttcccgcccaagccaaaagacaccctgtatatcactcgcgaaccggaagtcacttgcgtggtcgtggacgtgtcccacgaggaccccgaggtcaagtttaattggtacgtggacggagtggaagtgcacaacgccaagaccaagccgcgggaagaacagtacaactccacctaccgcgtggtgtccgtcctgactgtgctccaccaggactggctgaacggaaaggagtacaagtgcaaagtgtccaacaaggcactgccagcccctatcgaaaagactatctccaaggccaagggccaacctagggagccccaggtgtacacgttgcctccttcccgcgaagaaatgactaagaaccaggtgtcgctgacctgtctcgtgaaagggttctacccctctgacatcgccgtggaatgggagtcaaacggacagcctgagaacaactataagaccacaccacctgtcctggactccgacggctccttcttcctgtactcaaagttgaccgtggacaagtcgcggtggcaacagggcaacgtgttctcttgctccgtgatgcacgaagccctgcacaaccactacacccaaaagtcgctcagcctctcccccggaaag

SEQ ID NO: 2623 - protein, 12 aa, synthetic construct
  REGION 1..12: note = Description of Artificial Sequence: Synthetic peptide
GDSVSSSSAAWN

SEQ ID NO: 2624 - protein, 18 aa, synthetic construct
  REGION 1..18: note = Description of Artificial Sequence: Synthetic peptide
HIGYRSKWYNEYAVSVKS

SEQ ID NO: 2625 - protein, 16 aa, synthetic construct
  REGION 1..16: note = Description of Artificial Sequence: Synthetic peptide
GMYGSVPYKEGYYFDI

SEQ ID NO: 2626 - protein, 7 aa, synthetic construct
  REGION 1..7: note = Description of Artificial Sequence: Synthetic peptide
SSSAAWN

SEQ ID NO: 2627 - protein, 9 aa, synthetic construct
  REGION 1..9: note = Description of Artificial Sequence: Synthetic peptide
GDSVSSSSA

SEQ ID NO: 2628 - protein, 7 aa, synthetic construct
  REGION 1..7: note = Description of Artificial Sequence: Synthetic peptide
GYRSKWY

SEQ ID NO: 2629 - protein, 10 aa, synthetic construct
  REGION 1..10: note = Description of Artificial Sequence: Synthetic peptide
GDSVSSSSAA

SEQ ID NO: 2630 - protein, 9 aa, synthetic construct
  REGION 1..9: note = Description of Artificial Sequence: Synthetic peptide
IGYRSKWYN

SEQ ID NO: 2631 - protein, 18 aa, synthetic construct
  REGION 1..18: note = Description of Artificial Sequence: Synthetic peptide
ARGMYGSVPYKEGYYFDI

SEQ ID NO: 2632 - protein, 128 aa, synthetic construct
  REGION 1..128: note = Description of Artificial Sequence: Synthetic polypeptide
QVQLQQSGPGLVKPSQTLSLTCAISGDSVSSSSAAWNWIRQSPSRGLEWLGHIGYRSKWYNEYAVSVKSRITINPDTSKNQFSLQLNSVTPEDTAVYYCARGMYGSVPYKEGYYFDIWGQGTLVTVSS

SEQ ID NO: 2633 - DNA, 384 bp, synthetic construct
  misc_feature 1..384: note = Description of Artificial Sequence: Synthetic polynucleotide
  source 1..384: mol_type = other DNA
caggtgcaattgcagcagagcggtccgggcctggtgaaaccgagccagaccctgagcctgacctgcgcgatttccggagatagcgtgagctcttcttctgctgcttggaactggattcgtcagagcccgagccgtggcctcgagtggctgggccatatcggttaccgtagcaaatggtacaacgaatatgccgtgagcgtgaaaagccgcattaccattaacccggatacttcgaaaaaccagtttagcctgcaactgaacagcgtgaccccggaagatacggccgtgtattattgcgcgcgtggtatgtacggttctgttccctacaaagaaggttactacttcgatatttggggccaaggcaccctggtgactgttagctca

SEQ ID NO: 2634 - protein, 458 aa, synthetic construct
  REGION 1..458: note = Description of Artificial Sequence: Synthetic polypeptide
QVQLQQSGPGLVKPSQTLSLTCAISGDSVSSSSAAWNWIRQSPSRGLEWLGHIGYRSKWYNEYAVSVKSRITINPDTSKNQFSLQLNSVTPEDTAVYYCARGMYGSVPYKEGYYFDIWGQGTLVTVSSASTKGPSVFPLAPSSKSTSGGTAALGCLVKDYFPEPVTVSWNSGALTSGVHTFPAVLQSSGLYSLSSVVTVPSSSLGTQTYICNVNHKPSNTKVDKRVEPKSCDKTHTCPPCPAPEAAGGPSVFLFPPKPKDTLMISRTPEVTCVVVDVSHEDPEVKFNWYVDGVEVHNAKTKPREEQYNSTYRVVSVLTVLHQDWLNGKEYKCKVSNKALPAPIEKTISKAKGQPREPQVYTLPPSREEMTKNQVSLTCLVKGFYPSDIAVEWESNGQPENNYKTTPPVLDSDGSFFLYSKLTVDKSRWQQGNVFSCSVMHEALHNHYTQKSLSLSPGK

SEQ ID NO: 2635 - DNA, 1374 bp, synthetic construct
  misc_feature 1..1374: note = Description of Artificial Sequence: Synthetic polynucleotide
  source 1..1374: mol_type = other DNA
caggtgcaattgcagcagagcggtccgggcctggtgaaaccgagccagaccctgagcctgacctgcgcgatttccggagatagcgtgagctcttcttctgctgcttggaactggattcgtcagagcccgagccgtggcctcgagtggctgggccatatcggttaccgtagcaaatggtacaacgaatatgccgtgagcgtgaaaagccgcattaccattaacccggatacttcgaaaaaccagtttagcctgcaactgaacagcgtgaccccggaagatacggccgtgtattattgcgcgcgtggtatgtacggttctgttccctacaaagaaggttactacttcgatatttggggccaaggcaccctggtgactgttagctcagcctccaccaagggtccatcggtcttccccctggcaccctcctccaagagcacctctgggggcacagcggccctgggctgcctggtcaaggactacttccccgaaccggtgacggtgtcgtggaactcaggcgccctgaccagcggcgtgcacaccttcccggctgtcctacagtcctcaggactctactccctcagcagcgtggtgaccgtgccctccagcagcttgggcacccagacctacatctgcaacgtgaatcacaagcccagcaacaccaaggtggacaagagagttgagcccaaatcttgtgacaaaactcacacatgcccaccgtgcccagcacctgaagcagcggggggaccgtcagtcttcctcttccccccaaaacccaaggacaccctcatgatctcccggacccctgaggtcacatgcgtggtggtggacgtgagccacgaagaccctgaggtcaagttcaactggtacgtggacggcgtggaggtgcataatgccaagacaaagccgcgggaggagcagtacaacagcacgtaccgggtggtcagcgtcctcaccgtcctgcaccaggactggctgaatggcaaggagtacaagtgcaaggtctccaacaaagccctcccagcccccatcgagaaaaccatctccaaagccaaagggcagccccgagaaccacaggtgtacaccctgcccccatcccgggaggagatgaccaagaaccaggtcagcctgacctgcctggtcaaaggcttctatcccagcgacatcgccgtggagtgggagagcaatgggcagccggagaacaactacaagaccacgcctcccgtgctggactccgacggctccttcttcctctacagcaagctcaccgtggacaagagcaggtggcagcaggggaacgtcttctcatgctccgtgatgcatgaggctctgcacaaccactacacgcagaagagcctctccctgtctccgggtaaa

SEQ ID NO: 2636 - protein, 11 aa, synthetic construct
  REGION 1..11: note = Description of Artificial Sequence: Synthetic peptide
RASQGISSDLN

SEQ ID NO: 2637 - protein, 7 aa, synthetic construct
  REGION 1..7: note = Description of Artificial Sequence: Synthetic peptide
AASNLQS

SEQ ID NO: 2638 - protein, 9 aa, synthetic construct
  REGION 1..9: note = Description of Artificial Sequence: Synthetic peptide
QQYTDESMT

SEQ ID NO: 2639 - protein, 7 aa, synthetic construct
  REGION 1..7: note = Description of Artificial Sequence: Synthetic peptide
SQGISSD

SEQ ID NO: 2640 - skipped

SEQ ID NO: 2641 - protein, 6 aa, synthetic construct
  REGION 1..6: note = Description of Artificial Sequence: Synthetic peptide
YTDESM

SEQ ID NO: 2642 - protein, 6 aa, synthetic construct
  REGION 1..6: note = Description of Artificial Sequence: Synthetic peptide
QGISSD

SEQ ID NO: 2643 - protein, 107 aa, synthetic construct
  REGION 1..107: note = Description of Artificial Sequence: Synthetic polypeptide
DIQMTQSPSSLSASVGDRVTITCRASQGISSDLNWYQQKPGKAPKLLIYAASNLQSGVPSRFSGSGSGTDFTLTISSLQPEDFATYYCQQYTDESMTFGQGTKVEIK

SEQ ID NO: 2644 - DNA, 321 bp, synthetic construct
  misc_feature 1..321: note = Description of Artificial Sequence: Synthetic polynucleotide
  source 1..321: mol_type = other DNA
gatatccagatgacccagagcccgagcagcctgagcgccagcgtgggcgatcgcgtgaccattacctgcagagccagccagggtatttcttctgacctgaactggtaccagcagaaaccgggcaaagcgccgaaactattaatctacgctgcttctaacctgcaaagcggcgtgccgagccgctttagcggcagcggatccggcaccgatttcaccctgaccattagctctctgcaaccggaagactttgcgacctattattgccagcagtacactgacgaatctatgacctttggccagggcacgaaagttgaaattaaa

SEQ ID NO: 2645 - protein, 214 aa, synthetic construct
  REGION 1..214: note = Description of Artificial Sequence: Synthetic polypeptide
DIQMTQSPSSLSASVGDRVTITCRASQGISSDLNWYQQKPGKAPKLLIYAASNLQSGVPSRFSGSGSGTDFTLTISSLQPEDFATYYCQQYTDESMTFGQGTKVEIKRTVAAPSVFIFPPSDEQLKSGTASVVCLLNNFYPREAKVQWKVDNALQSGNSQESVTEQDSKDSTYSLSSTLTLSKADYEKHKVYACEVTHQGLSSPVTKSFNRGEC

SEQ ID NO: 2646 - DNA, 642 bp, synthetic construct
  misc_feature 1..642: note = Description of Artificial Sequence: Synthetic polynucleotide
  source 1..642: mol_type = other DNA
gatatccagatgacccagagcccgagcagcctgagcgccagcgtgggcgatcgcgtgaccattacctgcagagccagccagggtatttcttctgacctgaactggtaccagcagaaaccgggcaaagcgccgaaactattaatctacgctgcttctaacctgcaaagcggcgtgccgagccgctttagcggcagcggatccggcaccgatttcaccctgaccattagctctctgcaaccggaagactttgcgacctattattgccagcagtacactgacgaatctatgacctttggccagggcacgaaagttgaaattaaacgtacggtggccgctcccagcgtgttcatcttcccccccagcgacgagcagctgaagagcggcaccgccagcgtggtgtgcctgctgaacaacttctacccccgggaggccaaggtgcagtggaaggtggacaacgccctgcagagcggcaacagccaggaaagcgtcaccgagcaggacagcaaggactccacctacagcctgagcagcaccctgaccctgagcaaggccgactacgagaagcacaaggtgtacgcctgcgaggtgacccaccagggcctgtccagccccgtgaccaagagcttcaaccggggcgagtgt

SEQ ID NO: 2647 - DNA, 384 bp, synthetic construct
  misc_feature 1..384: note = Description of Artificial Sequence: Synthetic polynucleotide
  source 1..384: mol_type = other DNA
caagtgcaactccagcagtcaggaccggggttggtcaagccttcgcagaccctgtccctcacttgcgccattagcggagattcggtgtcgtcgtcgtcagccgcctggaactggattagacagtccccttcccgagggctggagtggctgggccacatcggataccgcagcaagtggtacaacgaatacgccgtcagcgtgaagtcacgcatcaccatcaacccggatactagcaagaaccagttcagcctccagttgaactccgtgaccccggaggataccgccgtgtactactgtgcgcggggcatgtacggatccgtgccgtacaaggagggatactacttcgacatttggggccaggggactcttgtcaccgtgtcctcg

SEQ ID NO: 2648 - protein, 458 aa, synthetic construct
  REGION 1..458: note = Description of Artificial Sequence: Synthetic polypeptide
QVQLQQSGPGLVKPSQTLSLTCAISGDSVSSSSAAWNWIRQSPSRGLEWLGHIGYRSKWYNEYAVSVKSRITINPDTSKNQFSLQLNSVTPEDTAVYYCARGMYGSVPYKEGYYFDIWGQGTLVTVSSASTKGPSVFPLAPSSKSTSGGTAALGCLVKDYFPEPVTVSWNSGALTSGVHTFPAVLQSSGLYSLSSVVTVPSSSLGTQTYICNVNHKPSNTKVDKRVEPKSCDKTHTCPPCPAPELLGGPSVFLFPPKPKDTLMISRTPEVTCVVVDVSHEDPEVKFNWYVDGVEVHNAKTKPREEQYNSTYRVVSVLTVLHQDWLNGKEYKCKVSNKALPAPIEKTISKAKGQPREPQVYTLPPSREEMTKNQVSLTCLVKGFYPSDIAVEWESNGQPENNYKTTPPVLDSDGSFFLYSKLTVDKSRWQQGNVFSCSVMHEALHNHYTQKSLSLSPGK

SEQ ID NO: 2649 - DNA, 1374 bp, synthetic construct
  misc_feature 1..1374: note = Description of Artificial Sequence: Synthetic polynucleotide
  source 1..1374: mol_type = other DNA
caagtgcaactccagcagtcaggaccggggttggtcaagccttcgcagaccctgtccctcacttgcgccattagcggagattcggtgtcgtcgtcgtcagccgcctggaactggattagacagtccccttcccgagggctggagtggctgggccacatcggataccgcagcaagtggtacaacgaatacgccgtcagcgtgaagtcacgcatcaccatcaacccggatactagcaagaaccagttcagcctccagttgaactccgtgaccccggaggataccgccgtgtactactgtgcgcggggcatgtacggatccgtgccgtacaaggagggatactacttcgacatttggggccaggggactcttgtcaccgtgtcctcggcctccactaagggcccaagtgtgtttcccctggcccccagcagcaagtctacttccggcggaactgctgccctgggttgcctggtgaaggactacttccccgagcccgtgacagtgtcctggaactctggggctctgacttccggcgtgcacaccttccccgccgtgctgcagagcagcggcctgtacagcctgagcagcgtggtgacagtgccctccagctctctgggaacccagacctatatctgcaacgtgaaccacaagcccagcaacaccaaggtggacaagagagtggagcccaagagctgcgacaagacccacacctgccccccctgcccagctccagaactgctgggagggccttccgtgttcctgttcccccccaagcccaaggacaccctgatgatcagcaggacccccgaggtgacctgcgtggtggtggacgtgtcccacgaggacccagaggtgaagttcaactggtacgtggacggcgtggaggtgcacaacgccaagaccaagcccagagaggagcagtacaacagcacctacagggtggtgtccgtgctgaccgtgctgcaccaggactggctgaacggcaaagaatacaagtgcaaagtctccaacaaggccctgccagccccaatcgaaaagacaatcagcaaggccaagggccagccacgggagccccaggtgtacaccctgccccccagccgggaggagatgaccaagaaccaggtgtccctgacctgtctggtgaagggcttctaccccagcgatatcgccgtggagtgggagagcaacggccagcccgagaacaactacaagaccacccccccagtgctggacagcgacggcagcttcttcctgtacagcaagctgaccgtggacaagtccaggtggcagcagggcaacgtgttcagctgcagcgtgatgcacgaggccctgcacaaccactacacccagaagtccctgagcctgagccccggcaag

SEQ ID NO: 2650 - DNA, 321 bp, synthetic construct
  misc_feature 1..321: note = Description of Artificial Sequence: Synthetic polynucleotide
  source 1..321: mol_type = other DNA
gacattcagatgacccagtccccgtcgtccctgtccgcatccgtgggcgacagagtcaccatcacttgccgggcctcacagggaatttcctccgacctgaactggtatcagcagaagcctggaaaggccccgaagctgctgatctacgccgcgtccaacttgcaatcgggagtgccaagccgcttttctggttccgggagcgggactgacttcaccctgactattagcagcctgcagcccgaagatttcgctacctactactgccaacagtacacagatgaatccatgaccttcggacagggcaccaaagtcgagatcaag

SEQ ID NO: 2651 - DNA, 642 bp, synthetic construct
  misc_feature 1..642: note = Description of Artificial Sequence: Synthetic polynucleotide
  source 1..642: mol_type = other DNA
gacattcagatgacccagtccccgtcgtccctgtccgcatccgtgggcgacagagtcaccatcacttgccgggcctcacagggaatttcctccgacctgaactggtatcagcagaagcctggaaaggccccgaagctgctgatctacgccgcgtccaacttgcaatcgggagtgccaagccgcttttctggttccgggagcgggactgacttcaccctgactattagcagcctgcagcccgaagatttcgctacctactactgccaacagtacacagatgaatccatgaccttcggacagggcaccaaagtcgagatcaagcgtacggtggccgctcccagcgtgttcatcttcccccccagcgacgagcagctgaagagcggcaccgccagcgtggtgtgcctgctgaacaacttctacccccgggaggccaaggtgcagtggaaggtggacaacgccctgcagagcggcaacagccaggagagcgtcaccgagcaggacagcaaggactccacctacagcctgagcagcaccctgaccctgagcaaggccgactacgagaagcataaggtgtacgcctgcgaggtgacccaccagggcctgtccagccccgtgaccaagagcttcaacaggggcgagtgc

SEQ ID NO: 2652 - protein, 458 aa, synthetic construct
  REGION 1..458: note = Description of Artificial Sequence: Synthetic polypeptide
QVQLQQSGPGLVKPSQTLSLTCAISGDSVSSSSAAWNWIRQSPSRGLEWLGHIGYRSKWYNEYAVSVKSRITINPDTSKNQFSLQLNSVTPEDTAVYYCARGMYGSVPYKEGYYFDIWGQGTLVTVSSASTKGPSVFPLAPSSKSTSGGTAALGCLVKDYFPEPVTVSWNSGALTSGVHTFPAVLQSSGLYSLSSVVTVPSSSLGTQTYICNVNHKPSNTKVDKRVEPKSCDKTHTCPPCPAPELLGGPSVFLFPPKPKDTLMISRTPEVTCVVVAVSHEDPEVKFNWYVDGVEVHNAKTKPREEQYNSTYRVVSVLTVLHQDWLNGKEYKCKVSNKALAAPIEKTISKAKGQPREPQVYTLPPSREEMTKNQVSLTCLVKGFYPSDIAVEWESNGQPENNYKTTPPVLDSDGSFFLYSKLTVDKSRWQQGNVFSCSVMHEALHNHYTQKSLSLSPGK

SEQ ID NO: 2653 - DNA, 1374 bp, synthetic construct
  misc_feature 1..1374: note = Description of Artificial Sequence: Synthetic polynucleotide
  source 1..1374: mol_type = other DNA
caagtgcaactccagcagtcaggaccggggttggtcaagccttcgcagaccctgtccctcacttgcgccattagcggagattcggtgtcgtcgtcgtcagccgcctggaactggattagacagtccccttcccgagggctggagtggctgggccacatcggataccgcagcaagtggtacaacgaatacgccgtcagcgtgaagtcacgcatcaccatcaacccggatactagcaagaaccagttcagcctccagttgaactccgtgaccccggaggataccgccgtgtactactgtgcgcggggcatgtacggatccgtgccgtacaaggagggatactacttcgacatttggggccaggggactcttgtcaccgtgtcctcggcctccactaagggcccgtcagtgttcccccttgcgccatcctcgaagtcaacctccggaggaactgccgcactgggttgcctcgtgaaagactatttcccggaacccgtcactgtctcctggaactcaggagcgctcaccagcggagtgcatacctttcctgcggtgctgcagtccagcggcctgtactccctgagctccgtcgtgaccgtcccctcgtcgtccctgggaacccaaacctacatttgcaacgtcaatcacaagccaagcaacactaaggtggacaagagagtggagcccaagtcctgcgataagacccacacctgtcctccctgtccggcacctgaactgcttggtggaccttccgtgttcctgttcccgcccaagccaaaagacaccctgatgatctcccgcactccggaagtcacttgcgtggtcgtggccgtgtcccacgaggaccccgaggtcaagtttaattggtacgtggacggagtggaagtgcacaacgccaagaccaagccgcgggaagaacagtacaactccacctaccgcgtggtgtccgtcctgactgtgctccaccaggactggctgaacggaaaggagtacaagtgcaaagtgtccaacaaggcactggctgcccctatcgaaaagactatctccaaggccaagggccaacctagggagccccaggtgtacacgttgcctccttcccgcgaagaaatgactaagaaccaggtgtcgctgacctgtctcgtgaaagggttctacccctctgacatcgccgtggaatgggagtcaaacggacagcctgagaacaactataagaccacaccacctgtcctggactccgacggctccttcttcctgtactcaaagttgaccgtggacaagtcgcggtggcaacagggcaacgtgttctcttgctccgtgatgcacgaagccctgcacaaccactacacccaaaagtcgctcagcctctcccccggaaag

SEQ ID NO: 2654 - protein, 458 aa, synthetic construct
  REGION 1..458: note = Description of Artificial Sequence: Synthetic polypeptide
QVQLQQSGPGLVKPSQTLSLTCAISGDSVSSSSAAWNWIRQSPSRGLEWLGHIGYRSKWYNEYAVSVKSRITINPDTSKNQFSLQLNSVTPEDTAVYYCARGMYGSVPYKEGYYFDIWGQGTLVTVSSASTKGPSVFPLAPSSKSTSGGTAALGCLVKDYFPEPVTVSWNSGALTSGVHTFPAVLQSSGLYSLSSVVTVPSSSLGTQTYICNVNHKPSNTKVDKRVEPKSCDKTHTCPPCPAPELLGGPSVFLFPPKPKDTLMISRTPEVTCVVVDVSHEDPEVKFNWYVDGVEVHNAKTKPREEQYNSTYRVVSVLTVLHQDWLNGKEYKCKVSNKALPAPIEKTISKAKGQPREPQVYTLPPSREEMTKNQVSLTCLVKGFYPSDIAVEWESNGQPENNYKTTPPVLDSDGSFFLYSKLTVDKSRWQQGNVFSCSVLHEALHSHYTQKSLSLSPGK

SEQ ID NO: 2655 - DNA, 1374 bp, synthetic construct
  misc_feature 1..1374: note = Description of Artificial Sequence: Synthetic polynucleotide
  source 1..1374: mol_type = other DNA
caagtgcaactccagcagtcaggaccggggttggtcaagccttcgcagaccctgtccctcacttgcgccattagcggagattcggtgtcgtcgtcgtcagccgcctggaactggattagacagtccccttcccgagggctggagtggctgggccacatcggataccgcagcaagtggtacaacgaatacgccgtcagcgtgaagtcacgcatcaccatcaacccggatactagcaagaaccagttcagcctccagttgaactccgtgaccccggaggataccgccgtgtactactgtgcgcggggcatgtacggatccgtgccgtacaaggagggatactacttcgacatttggggccaggggactcttgtcaccgtgtcctcggcctccactaagggcccgtcagtgttcccccttgcgccatcctcgaagtcaacctccggaggaactgccgcactgggttgcctcgtgaaagactatttcccggaacccgtcactgtctcctggaactcaggagcgctcaccagcggagtgcatacctttcctgcggtgctgcagtccagcggcctgtactccctgagctccgtcgtgaccgtcccctcgtcgtccctgggaacccaaacctacatttgcaacgtcaatcacaagccaagcaacactaaggtggacaagagagtggagcccaagtcctgcgataagacccacacctgtcctccctgtccggcacctgaactgcttggtggaccttccgtgttcctgttcccgcccaagccaaaagacaccctgatgatctcccgcactccggaagtcacttgcgtggtcgtggacgtgtcccacgaggaccccgaggtcaagtttaattggtacgtggacggagtggaagtgcacaacgccaagaccaagccgcgggaagaacagtacaactccacctaccgcgtggtgtccgtcctgactgtgctccaccaggactggctgaacggaaaggagtacaagtgcaaagtgtccaacaaggcactgccagcccctatcgaaaagactatctccaaggccaagggccaacctagggagccccaggtgtacacgttgcctccttcccgcgaagaaatgactaagaaccaggtgtcgctgacctgtctcgtgaaagggttctacccctctgacatcgccgtggaatgggagtcaaacggacagcctgagaacaactataagaccacaccacctgtcctggactccgacggctccttcttcctgtactcaaagttgaccgtggacaagtcgcggtggcaacagggcaacgtgttctcttgctccgtgctgcacgaagccctgcacagccactacacccaaaagtcgctcagcctctcccccggaaag

SEQ ID NO: 2656 - protein, 458 aa, synthetic construct
  REGION 1..458: note = Description of Artificial Sequence: Synthetic polypeptide
QVQLQQSGPGLVKPSQTLSLTCAISGDSVSSSSAAWNWIRQSPSRGLEWLGHIGYRSKWYNEYAVSVKSRITINPDTSKNQFSLQLNSVTPEDTAVYYCARGMYGSVPYKEGYYFDIWGQGTLVTVSSASTKGPSVFPLAPSSKSTSGGTAALGCLVKDYFPEPVTVSWNSGALTSGVHTFPAVLQSSGLYSLSSVVTVPSSSLGTQTYICNVNHKPSNTKVDKRVEPKSCDKTHTCPPCPAPELLGGPSVFLFPPKPKDTLMISRTPEVTCVVVAVSHEDPEVKFNWYVDGVEVHNAKTKPREEQYNSTYRVVSVLTVLHQDWLNGKEYKCKVSNKALAAPIEKTISKAKGQPREPQVYTLPPSREEMTKNQVSLTCLVKGFYPSDIAVEWESNGQPENNYKTTPPVLDSDGSFFLYSKLTVDKSRWQQGNVFSCSVLHEALHSHYTQKSLSLSPGK

SEQ ID NO: 2657 - DNA, 1374 bp, synthetic construct
  misc_feature 1..1374: note = Description of Artificial Sequence: Synthetic polynucleotide
  source 1..1374: mol_type = other DNA
caagtgcaactccagcagtcaggaccggggttggtcaagccttcgcagaccctgtccctcacttgcgccattagcggagattcggtgtcgtcgtcgtcagccgcctggaactggattagacagtccccttcccgagggctggagtggctgggccacatcggataccgcagcaagtggtacaacgaatacgccgtcagcgtgaagtcacgcatcaccatcaacccggatactagcaagaaccagttcagcctccagttgaactccgtgaccccggaggataccgccgtgtactactgtgcgcggggcatgtacggatccgtgccgtacaaggagggatactacttcgacatttggggccaggggactcttgtcaccgtgtcctcggcctccactaagggcccgtcagtgttcccccttgcgccatcctcgaagtcaacctccggaggaactgccgcactgggttgcctcgtgaaagactatttcccggaacccgtcactgtctcctggaactcaggagcgctcaccagcggagtgcatacctttcctgcggtgctgcagtccagcggcctgtactccctgagctccgtcgtgaccgtcccctcgtcgtccctgggaacccaaacctacatttgcaacgtcaatcacaagccaagcaacactaaggtggacaagagagtggagcccaagtcctgcgataagacccacacctgtcctccctgtccggcacctgaactgcttggtggaccttccgtgttcctgttcccgcccaagccaaaagacaccctgatgatctcccgcactccggaagtcacttgcgtggtcgtggccgtgtcccacgaggaccccgaggtcaagtttaattggtacgtggacggagtggaagtgcacaacgccaagaccaagccgcgggaagaacagtacaactccacctaccgcgtggtgtccgtcctgactgtgctccaccaggactggctgaacggaaaggagtacaagtgcaaagtgtccaacaaggcactggctgcccctatcgaaaagactatctccaaggccaagggccaacctagggagccccaggtgtacacgttgcctccttcccgcgaagaaatgactaagaaccaggtgtcgctgacctgtctcgtgaaagggttctacccctctgacatcgccgtggaatgggagtcaaacggacagcctgagaacaactataagaccacaccacctgtcctggactccgacggctccttcttcctgtactcaaagttgaccgtggacaagtcgcggtggcaacagggcaacgtgttctcttgctccgtgctgcacgaagccctgcacagccactacacccaaaagtcgctcagcctctcccccggaaag

SEQ ID NO: 2658 - protein, 458 aa, synthetic construct
  REGION 1..458: note = Description of Artificial Sequence: Synthetic polypeptide
QVQLQQSGPGLVKPSQTLSLTCAISGDSVSSSSAAWNWIRQSPSRGLEWLGHIGYRSKWYNEYAVSVKSRITINPDTSKNQFSLQLNSVTPEDTAVYYCARGMYGSVPYKEGYYFDIWGQGTLVTVSSASTKGPSVFPLAPSSKSTSGGTAALGCLVKDYFPEPVTVSWNSGALTSGVHTFPAVLQSSGLYSLSSVVTVPSSSLGTQTYICNVNHKPSNTKVDKRVEPKSCDKTHTCPPCPAPELLGGPSVFLFPPKPKDTLYITREPEVTCVVVDVSHEDPEVKFNWYVDGVEVHNAKTKPREEQYNSTYRVVSVLTVLHQDWLNGKEYKCKVSNKALPAPIEKTISKAKGQPREPQVYTLPPSREEMTKNQVSLTCLVKGFYPSDIAVEWESNGQPENNYKTTPPVLDSDGSFFLYSKLTVDKSRWQQGNVFSCSVMHEALHNHYTQKSLSLSPGK

SEQ ID NO: 2659 - DNA, 1374 bp, synthetic construct
  misc_feature 1..1374: note = Description of Artificial Sequence: Synthetic polynucleotide
  source 1..1374: mol_type = other DNA
caagtgcaactccagcagtcaggaccggggttggtcaagccttcgcagaccctgtccctcacttgcgccattagcggagattcggtgtcgtcgtcgtcagccgcctggaactggattagacagtccccttcccgagggctggagtggctgggccacatcggataccgcagcaagtggtacaacgaatacgccgtcagcgtgaagtcacgcatcaccatcaacccggatactagcaagaaccagttcagcctccagttgaactccgtgaccccggaggataccgccgtgtactactgtgcgcggggcatgtacggatccgtgccgtacaaggagggatactacttcgacatttggggccaggggactcttgtcaccgtgtcctcggcctccactaagggcccgtcagtgttcccccttgcgccatcctcgaagtcaacctccggaggaactgccgcactgggttgcctcgtgaaagactatttcccggaacccgtcactgtctcctggaactcaggagcgctcaccagcggagtgcatacctttcctgcggtgctgcagtccagcggcctgtactccctgagctccgtcgtgaccgtcccctcgtcgtccctgggaacccaaacctacatttgcaacgtcaatcacaagccaagcaacactaaggtggacaagagagtggagcccaagtcctgcgataagacccacacctgtcctccctgtccggcacctgaactgcttggtggaccttccgtgttcctgttcccgcccaagccaaaagacaccctgtatatcactcgcgaaccggaagtcacttgcgtggtcgtggacgtgtcccacgaggaccccgaggtcaagtttaattggtacgtggacggagtggaagtgcacaacgccaagaccaagccgcgggaagaacagtacaactccacctaccgcgtggtgtccgtcctgactgtgctccaccaggactggctgaacggaaaggagtacaagtgcaaagtgtccaacaaggcactgccagcccctatcgaaaagactatctccaaggccaagggccaacctagggagccccaggtgtacacgttgcctccttcccgcgaagaaatgactaagaaccaggtgtcgctgacctgtctcgtgaaagggttctacccctctgacatcgccgtggaatgggagtcaaacggacagcctgagaacaactataagaccacaccacctgtcctggactccgacggctccttcttcctgtactcaaagttgaccgtggacaagtcgcggtggcaacagggcaacgtgttctcttgctccgtgatgcacgaagccctgcacaaccactacacccaaaagtcgctcagcctctcccccggaaag

SEQ ID NO: 2660 - protein, 9 aa, synthetic construct
  REGION 1..9: note = Description of Artificial Sequence: Synthetic peptide
QQHGHSPTT

SEQ ID NO: 2661 - protein, 6 aa, synthetic construct
  REGION 1..6: note = Description of Artificial Sequence: Synthetic peptide
HGHSPT

SEQ ID NO: 2662 - protein, 107 aa, synthetic construct
  REGION 1..107: note = Description of Artificial Sequence: Synthetic polypeptide
DIQMTQSPSSLSASVGDRVTITCRASQDISNYLAWYQQKPGKAPKLLIYRASSLQSGVPSRFSGSGSGTDFTLTISSLQPEDFATYYCQQHGHSPTTFGQGTKVEIK

SEQ ID NO: 2663 - DNA, 321 bp, synthetic construct
  misc_feature 1..321: note = Description of Artificial Sequence: Synthetic polynucleotide
  source 1..321: mol_type = other DNA
gatatccagatgacccagagcccgagcagcctgagcgccagcgtgggcgatcgcgtgaccattacctgcagagccagccaggacatttctaactacctggcttggtaccagcagaaaccgggcaaagcgccgaaactattaatctaccgtgcttcttctctgcaaagcggcgtgccgagccgctttagcggcagcggatccggcaccgatttcaccctgaccattagctctctgcaaccggaagactttgcgacctattattgccagcagcatggtcattctccgactacctttggccagggcacgaaagttgaaattaaa

SEQ ID NO: 2664 - protein, 214 aa, synthetic construct
  REGION 1..214: note = Description of Artificial Sequence: Synthetic polypeptide
DIQMTQSPSSLSASVGDRVTITCRASQDISNYLAWYQQKPGKAPKLLIYRASSLQSGVPSRFSGSGSGTDFTLTISSLQPEDFATYYCQQHGHSPTTFGQGTKVEIKRTVAAPSVFIFPPSDEQLKSGTASVVCLLNNFYPREAKVQWKVDNALQSGNSQESVTEQDSKDSTYSLSSTLTLSKADYEKHKVYACEVTHQGLSSPVTKSFNRGEC

SEQ ID NO: 2665 - DNA, 642 bp, synthetic construct
  misc_feature 1..642: note = Description of Artificial Sequence: Synthetic polynucleotide
  source 1..642: mol_type = other DNA
gatatccagatgacccagagcccgagcagcctgagcgccagcgtgggcgatcgcgtgaccattacctgcagagccagccaggacatttctaactacctggcttggtaccagcagaaaccgggcaaagcgccgaaactattaatctaccgtgcttcttctctgcaaagcggcgtgccgagccgctttagcggcagcggatccggcaccgatttcaccctgaccattagctctctgcaaccggaagactttgcgacctattattgccagcagcatggtcattctccgactacctttggccagggcacgaaagttgaaattaaacgtacggtggccgctcccagcgtgttcatcttcccccccagcgacgagcagctgaagagcggcaccgccagcgtggtgtgcctgctgaacaacttctacccccgggaggccaaggtgcagtggaaggtggacaacgccctgcagagcggcaacagccaggaaagcgtcaccgagcaggacagcaaggactccacctacagcctgagcagcaccctgaccctgagcaaggccgactacgagaagcacaaggtgtacgcctgcgaggtgacccaccagggcctgtccagccccgtgaccaagagcttcaaccggggcgagtgt

SEQ ID NO: 2666 - protein, 12 aa, synthetic construct
  REGION 1..12: note = Description of Artificial Sequence: Synthetic peptide
GFSLSTSGVGVS

SEQ ID NO: 2667 - protein, 16 aa, synthetic construct
  REGION 1..16: note = Description of Artificial Sequence: Synthetic peptide
LIFSDHDKIYSTSLKT

SEQ ID NO: 2668 - protein, 11 aa, synthetic construct
  REGION 1..11: note = Description of Artificial Sequence: Synthetic peptide
TLIDRSVYFDY

SEQ ID NO: 2669 - protein, 7 aa, synthetic construct
  REGION 1..7: note = Description of Artificial Sequence: Synthetic peptide
TSGVGVS

SEQ ID NO: 2670 - protein, 9 aa, synthetic construct
  REGION 1..9: note = Description of Artificial Sequence: Synthetic peptide
GFSLSTSGV

SEQ ID NO: 2671 - protein, 5 aa, synthetic construct
  REGION 1..5: note = Description of Artificial Sequence: Synthetic peptide
FSDHD

SEQ ID NO: 2672 - protein, 10 aa, synthetic construct
  REGION 1..10: note = Description of Artificial Sequence: Synthetic peptide
GFSLSTSGVG

SEQ ID NO: 2673 - protein, 7 aa, synthetic construct
  REGION 1..7: note = Description of Artificial Sequence: Synthetic peptide
IFSDHDK

SEQ ID NO: 2674 - protein, 13 aa, synthetic construct
  REGION 1..13: note = Description of Artificial Sequence: Synthetic peptide
ARTLIDRSVYFDY

SEQ ID NO: 2675 - protein, 121 aa, synthetic construct
  REGION 1..121: note = Description of Artificial Sequence: Synthetic polypeptide
QVQLKESGPALVKPTQTLTLTCTFSGFSLSTSGVGVSWIRQPPGKALEWLALIFSDHDKIYSTSLKTRLTISKDTSKNQVVLTMTNMDPVDTATYYCARTLIDRSVYFDYWGQGTLVTVSS

SEQ ID NO: 2676 - DNA, 363 bp, synthetic construct
  misc_feature 1..363: note = Description of Artificial Sequence: Synthetic polynucleotide
  source 1..363: mol_type = other DNA
caggtgcaattgaaagaaagcggtccggcgctggtgaaaccgacccagaccctgaccctgacgtgcaccttttccggattcagcctgtctacttccggtgttggtgtgagctggattcgccagccgccgggcaaagcgctcgagtggctggcgctgatcttctctgaccatgacaagatctatagcaccagcctgaaaacccgtctgaccattagcaaagatacttcgaaaaaccaggtggtgctgaccatgaccaacatggacccggtggataccgcgacctattattgcgcgcgtactctgatcgaccgttctgtttacttcgattactggggccaaggcaccctggtgactgttagctca

SEQ ID NO: 2677 - protein, 451 aa, synthetic construct
  REGION 1..451: note = Description of Artificial Sequence: Synthetic polypeptide
QVQLKESGPALVKPTQTLTLTCTFSGFSLSTSGVGVSWIRQPPGKALEWLALIFSDHDKIYSTSLKTRLTISKDTSKNQVVLTMTNMDPVDTATYYCARTLIDRSVYFDYWGQGTLVTVSSASTKGPSVFPLAPSSKSTSGGTAALGCLVKDYFPEPVTVSWNSGALTSGVHTFPAVLQSSGLYSLSSVVTVPSSSLGTQTYICNVNHKPSNTKVDKRVEPKSCDKTHTCPPCPAPEAAGGPSVFLFPPKPKDTLMISRTPEVTCVVVDVSHEDPEVKFNWYVDGVEVHNAKTKPREEQYNSTYRVVSVLTVLHQDWLNGKEYKCKVSNKALPAPIEKTISKAKGQPREPQVYTLPPSREEMTKNQVSLTCLVKGFYPSDIAVEWESNGQPENNYKTTPPVLDSDGSFFLYSKLTVDKSRWQQGNVFSCSVMHEALHNHYTQKSLSLSPGK

SEQ ID NO: 2678 - DNA, 1353 bp, synthetic construct
  misc_feature 1..1353: note = Description of Artificial Sequence: Synthetic polynucleotide
  source 1..1353: mol_type = other DNA
caggtgcaattgaaagaaagcggtccggcgctggtgaaaccgacccagaccctgaccctgacgtgcaccttttccggattcagcctgtctacttccggtgttggtgtgagctggattcgccagccgccgggcaaagcgctcgagtggctggcgctgatcttctctgaccatgacaagatctatagcaccagcctgaaaacccgtctgaccattagcaaagatacttcgaaaaaccaggtggtgctgaccatgaccaacatggacccggtggataccgcgacctattattgcgcgcgtactctgatcgaccgttctgtttacttcgattactggggccaaggcaccctggtgactgttagctcagcctccaccaagggtccatcggtcttccccctggcaccctcctccaagagcacctctgggggcacagcggccctgggctgcctggtcaaggactacttccccgaaccggtgacggtgtcgtggaactcaggcgccctgaccagcggcgtgcacaccttcccggctgtcctacagtcctcaggactctactccctcagcagcgtggtgaccgtgccctccagcagcttgggcacccagacctacatctgcaacgtgaatcacaagcccagcaacaccaaggtggacaagagagttgagcccaaatcttgtgacaaaactcacacatgcccaccgtgcccagcacctgaagcagcggggggaccgtcagtcttcctcttccccccaaaacccaaggacaccctcatgatctcccggacccctgaggtcacatgcgtggtggtggacgtgagccacgaagaccctgaggtcaagttcaactggtacgtggacggcgtggaggtgcataatgccaagacaaagccgcgggaggagcagtacaacagcacgtaccgggtggtcagcgtcctcaccgtcctgcaccaggactggctgaatggcaaggagtacaagtgcaaggtctccaacaaagccctcccagcccccatcgagaaaaccatctccaaagccaaagggcagccccgagaaccacaggtgtacaccctgcccccatcccgggaggagatgaccaagaaccaggtcagcctgacctgcctggtcaaaggcttctatcccagcgacatcgccgtggagtgggagagcaatgggcagccggagaacaactacaagaccacgcctcccgtgctggactccgacggctccttcttcctctacagcaagctcaccgtggacaagagcaggtggcagcaggggaacgtcttctcatgctccgtgatgcatgaggctctgcacaaccactacacgcagaagagcctctccctgtctccgggtaaa

SEQ ID NO: 2679 - protein, 13 aa, synthetic construct
  REGION 1..13: note = Description of Artificial Sequence: Synthetic peptide
SGSSSNIGHHYVS

SEQ ID NO: 2680 - protein, 7 aa, synthetic construct
  REGION 1..7: note = Description of Artificial Sequence: Synthetic peptide
DNTNRPS

SEQ ID NO: 2681 - protein, 11 aa, synthetic construct
  REGION 1..11: note = Description of Artificial Sequence: Synthetic peptide
ATWDGLMNSIV

SEQ ID NO: 2682 - protein, 9 aa, synthetic construct
  REGION 1..9: note = Description of Artificial Sequence: Synthetic peptide
SSSNIGHHY

SEQ ID NO: 2683 - skipped

SEQ ID NO: 2684 - protein, 8 aa, synthetic construct
  REGION 1..8: note = Description of Artificial Sequence: Synthetic peptide
WDGLMNSI

SEQ ID NO: 2685 - protein, 8 aa, synthetic construct
  REGION 1..8: note = Description of Artificial Sequence: Synthetic peptide
SSNIGHHY

SEQ ID NO: 2686 - protein, 110 aa, synthetic construct
  REGION 1..110: note = Description of Artificial Sequence: Synthetic polypeptide
DIVLTQPPSVSGAPGQRVTISCSGSSSNIGHHYVSWYQQLPGTAPKLLIYDNTNRPSGVPDRFSGSKSGTSASLAITGLQAEDEADYYCATWDGLMNSIVFGGGTKLTVL

SEQ ID NO: 2687 - DNA, 330 bp, synthetic construct
  misc_feature 1..330: note = Description of Artificial Sequence: Synthetic polynucleotide
  source 1..330: mol_type = other DNA
gatatcgtgctgacccagccgccgagcgtgagcggtgcaccgggccagcgcgtgaccattagctgtagcggcagcagcagcaacattggtcatcattacgtgtcttggtaccagcagctgccgggcacggcgccgaaactgctgatctacgacaacactaaccgcccgagcggcgtgccggatcgctttagcggatccaaaagcggcaccagcgccagcctggcgattaccggcctgcaagcagaagacgaagcggattattactgcgctacttgggacggtctgatgaactctatcgtgtttggcggcggcacgaagttaaccgtccta

SEQ ID NO: 2688 - protein, 216 aa, synthetic construct
  REGION 1..216: note = Description of Artificial Sequence: Synthetic polypeptide
DIVLTQPPSVSGAPGQRVTISCSGSSSNIGHHYVSWYQQLPGTAPKLLIYDNTNRPSGVPDRFSGSKSGTSASLAITGLQAEDEADYYCATWDGLMNSIVFGGGTKLTVLGQPKAAPSVTLFPPSSEELQANKATLVCLISDFYPGAVTVAWKADSSPVKAGVETTTPSKQSNNKYAASSYLSLTPEQWKSHRSYSCQVTHEGSTVEKTVAPTECS

SEQ ID NO: 2689 - DNA, 648 bp, synthetic construct
  misc_feature 1..648: note = Description of Artificial Sequence: Synthetic polynucleotide
  source 1..648: mol_type = other DNA
gatatcgtgctgacccagccgccgagcgtgagcggtgcaccgggccagcgcgtgaccattagctgtagcggcagcagcagcaacattggtcatcattacgtgtcttggtaccagcagctgccgggcacggcgccgaaactgctgatctacgacaacactaaccgcccgagcggcgtgccggatcgctttagcggatccaaaagcggcaccagcgccagcctggcgattaccggcctgcaagcagaagacgaagcggattattactgcgctacttgggacggtctgatgaactctatcgtgtttggcggcggcacgaagttaaccgtcctaggtcagcccaaggctgccccctcggtcactctgttcccgccctcctctgaggagcttcaagccaacaaggccacactggtgtgtctcataagtgacttctacccgggagccgtgacagtggcctggaaggcagatagcagccccgtcaaggcgggagtggagaccaccacaccctccaaacaaagcaacaacaagtacgcggccagcagctatctgagcctgacgcctgagcagtggaagtcccacagaagctacagctgccaggtcacgcatgaagggagcaccgtggagaagacagtggcccctacagaatgttca

SEQ ID NO: 2690 - protein, 118 aa, synthetic construct
  REGION 1..118: note = Description of Artificial Sequence: Synthetic polypeptide
EVKLLDSGGGLVQAGGSLRLSCAGSGFTFTDFYMSWIRQPPGKAPEWLGVIRNKANGYTAGYNPSVKGRFTISRDNTQNILYLQMNTLRAEDTAIYYCARLSYGFDYWGQGVMVTVSS

SEQ ID NO: 2691 - protein, 112 aa, synthetic construct
  REGION 1..112: note = Description of Artificial Sequence: Synthetic polypeptide
DIVMTQGALPNPVPSGESASITCQSSKSLLHSNGKTYLNWYLQRPGQSPQLLIYWMSTRASGVSDRFSGSGSGTDFTLKISSVEAEDVGVYYCQQFLEFPFTFGSGTKLEIK

SEQ ID NO: 2692 - protein, 10 aa, synthetic construct
  REGION 1..10: note = Description of Artificial Sequence: Synthetic peptide
GFTFTDFYMS

SEQ ID NO: 2693 - protein, 19 aa, synthetic construct
  REGION 1..19: note = Description of Artificial Sequence: Synthetic peptide
VIRNKANGYTAGYNPSVKG

SEQ ID NO: 2694 - protein, 9 aa, synthetic construct
  REGION 1..9: note = Description of Artificial Sequence: Synthetic peptide
ARLSYGFDY

SEQ ID NO: 2695 - protein, 16 aa, synthetic construct
  REGION 1..16: note = Description of Artificial Sequence: Synthetic peptide
QSSKSLLHSNGKTYLN

SEQ ID NO: 2696 - protein, 7 aa, synthetic construct
  REGION 1..7: note = Description of Artificial Sequence: Synthetic peptide
WMSTRAS

SEQ ID NO: 2697 - protein, 9 aa, synthetic construct
  REGION 1..9: note = Description of Artificial Sequence: Synthetic peptide
QQFLEFPFT

SEQ ID NO: 2698 - protein, 118 aa, synthetic construct
  REGION 1..118: note = Description of Artificial Sequence: Synthetic polypeptide
EVKLLESGGGLVQPGGSLRLSCAASGFTFTNFYMSWIRQPPGRAPEWLGVIRNRPNGYTTDYNPSVKGRFTISRDNTQNILYLQMSTLRADDTAFYYCTRLTYGFDYWGQGVMVTVSS

SEQ ID NO: 2699 - protein, 112 aa, synthetic construct
  REGION 1..112: note = Description of Artificial Sequence: Synthetic polypeptide
DIVMTQGALPNPVPSGESASITCQSSKSLLHSNGKTYLNWYLQRPGQSPQLLIYWMSTRASGVSDRFSGSGSGTDFTLKISSVEAEVVGVYYCQQFLEFPFTFGSGTKLEIK

SEQ ID NO: 2700 - protein, 10 aa, synthetic construct
  REGION 1..10: note = Description of Artificial Sequence: Synthetic peptide
GFTFTNFYMS

SEQ ID NO: 2701 - protein, 19 aa, synthetic construct
  REGION 1..19: note = Description of Artificial Sequence: Synthetic peptide
VIRNRPNGYTTDYNPSVKG

SEQ ID NO: 2702 - protein, 9 aa, synthetic construct
  REGION 1..9: note = Description of Artificial Sequence: Synthetic peptide
TRLTYGFDY

SEQ ID NO: 2703 - protein, 118 aa, synthetic construct
  REGION 1..118: note = Description of Artificial Sequence: Synthetic polypeptide
EVKLLDSGGGLVQAGGSLRLSCAGSGFTFTDFYMSWIRQPPGKAPEWLGVIRNKANGYTAGYNPSVKGRFTISRDNTQNILYLQMNTLRAEDTAIYYCARLTYGFDYWGQGVMVTVSS

SEQ ID NO: 2704 - protein, 112 aa, synthetic construct
  REGION 1..112: note = Description of Artificial Sequence: Synthetic polypeptide
DIVMTQGALPNPVPSGESASITCQSSKSLLHSNGKTYLNWYLQRPGQSPQLLIYWMSTRASGVSDRFSGSGSGTDFTLKISSVEAEDVGVYYCQQFLEYPFTFGSGTKLEIK

SEQ ID NO: 2705 - protein, 9 aa, synthetic construct
  REGION 1..9: note = Description of Artificial Sequence: Synthetic peptide
ARLTYGFDY

SEQ ID NO: 2706 - protein, 9 aa, synthetic construct
  REGION 1..9: note = Description of Artificial Sequence: Synthetic peptide
QQFLEYPFT

SEQ ID NO: 2707 - protein, 118 aa, synthetic construct
  REGION 1..118: note = Description of Artificial Sequence: Synthetic polypeptide
EVQLVESGGGLVQPGGSLRLSCAASGFTFTDFYMSWVRQAPGKGLEWVSVIRNKANGYTAGYNPSVKGRFTISRDNSKNTLYLQMNSLRAEDTAVYYCARLTYGFDYWGQGTLVTVSS

SEQ ID NO: 2708 - protein, 112 aa, synthetic construct
  REGION 1..112: note = Description of Artificial Sequence: Synthetic polypeptide
DIVMTQTPLSLPVTPGEPASISCQSSKSLLHSNGKTYLNWYLQKPGQSPQLLIYWMSTRASGVPDRFSGSGSGTDFTLKISRVEAEDVGVYYCQQFLEYPFTFGQGTKVEIK

SEQ ID NO: 2709 - protein, 118 aa, synthetic construct
  REGION 1..118: note = Description of Artificial Sequence: Synthetic polypeptide
EVQLVESGGGLVQPGGSLRLSCAGSGFTFTDFYMSWVRQAPGKGLEWVSVIRNKANGYTAGYNPSVKGRFTISRDNSKNTLYLQMNSLRAEDTAVYYCARLTYGFDYWGQGTLVTVSS

SEQ ID NO: 2710 - protein, 112 aa, synthetic construct
  REGION 1..112: note = Description of Artificial Sequence: Synthetic polypeptide
DIVMTQTPLSLPVTPGEPASISCQSSKSLLHSTGKTYLNWYLQKPGQSPQLLIYWMSTRASGVPDRFSGSGSGTDFTLKISRVEAEDVGVYYCQQFLEYPFTFGQGTKVEIK

SEQ ID NO: 2711 - protein, 16 aa, synthetic construct
  REGION 1..16: note = Description of Artificial Sequence: Synthetic peptide
QSSKSLLHSTGKTYLN

SEQ ID NO: 2712 - protein, 118 aa, synthetic construct
  REGION 1..118: note = Description of Artificial Sequence: Synthetic polypeptide
EVQLVESGGGLVQPGGSLRLSCAASGFTFTDFYMSWVRQAPGKGLEWVSVIRNKANAYTAGYNPSVKGRFTISRDNSKNTLYLQMNSLRAEDTAVYYCARLTYGFDYWGQGTLVTVSS

SEQ ID NO: 2713 - protein, 19 aa, synthetic construct
  REGION 1..19: note = Description of Artificial Sequence: Synthetic peptide
VIRNKANAYTAGYNPSVKG

SEQ ID NO: 2714 - protein, 118 aa, synthetic construct
  REGION 1..118: note = Description of Artificial Sequence: Synthetic polypeptide
EVQLVESGGGLVQPGGSLRLSCAGSGFTFTDFYMSWVRQAPGKGPEWLSVIRNKANAYTAGYNPSVKGRFTISRDNSKNTLYLQMNSLRAEDTAVYYCARLTYGFDYWGQGTLVTVSS

SEQ ID NO: 2715 - protein, 120 aa, synthetic construct
  REGION 1..120: note = Description of Artificial Sequence: Synthetic polypeptide
EVQLQQSGAELVRSGASVKLSCTASGFSIEDFYIHWVKQRPEQGLEWIGWIDPENGDSKYAPKFQGKATMTADTSSNTAYLHLSSLTSEDTAVYYCHADHGNYGSTMDYWGQGTSVTVSS

SEQ ID NO: 2716 - protein, 107 aa, synthetic construct
  REGION 1..107: note = Description of Artificial Sequence: Synthetic polypeptide
DIQMNQSPSSLSASLGDTVTITCHASQHINVWLSWYQQKPGDHPKLLIYKASNLHTGVPSRFSGSGSGTGFTLTISSLQPEDIATYYCQQGQTYPRTFGGGTKLEIK

SEQ ID NO: 2717 - protein, 10 aa, synthetic construct
  REGION 1..10: note = Description of Artificial Sequence: Synthetic peptide
GFSIEDFYIH

SEQ ID NO: 2718 - protein, 17 aa, synthetic construct
  REGION 1..17: note = Description of Artificial Sequence: Synthetic peptide
WIDPENGDSKYAPKFQG

SEQ ID NO: 2719 - protein, 13 aa, synthetic construct
  REGION 1..13: note = Description of Artificial Sequence: Synthetic peptide
HADHGNYGSTMDY

SEQ ID NO: 2720 - protein, 11 aa, synthetic construct
  REGION 1..11: note = Description of Artificial Sequence: Synthetic peptide
HASQHINVWLS

SEQ ID NO: 2721 - protein, 7 aa, synthetic construct
  REGION 1..7: note = Description of Artificial Sequence: Synthetic peptide
KASNLHT

SEQ ID NO: 2722 - protein, 9 aa, synthetic construct
  REGION 1..9: note = Description of Artificial Sequence: Synthetic peptide
QQGQTYPRT

SEQ ID NO: 2723 - protein, 120 aa, synthetic construct
  REGION 1..120: note = Description of Artificial Sequence: Synthetic polypeptide
QVQLVQSGAEVKKPGASVKVSCKASGFSIEDFYIHWVRQAPGQGLEWMGWIDPENGDSKYAPKFQGRATITADTSTSTAYMELSSLRSEDTAVYYCHADHGNYGSTMDYWGQGTLVTVSS

SEQ ID NO: 2724 - protein, 107 aa, synthetic construct
  REGION 1..107: note = Description of Artificial Sequence: Synthetic polypeptide
DIQMTQSPSSLSASVGDRVTITCHASQHINVWLSWYQQKPGKAPKLLIYKASNLHTGVPSRFSGSGSGTDFTLTISSLQPEDFATYYCQQGQTYPRTFGQGTKVEIK

SEQ ID NO: 2725 - protein, 120 aa, synthetic construct
  REGION 1..120: note = Description of Artificial Sequence: Synthetic polypeptide
QVQLVQSGAEVKKPGASVKVSCKASGFSIEDFYIHWVRQAPGQGLEWMGWIDPENGDSKYAPKFQGRVTITADTSTSTAYMELSSLRSEDTAVYYCHADHGNYGSTMDYWGQGTLVTVSS

SEQ ID NO: 2726 - protein, 120 aa, synthetic construct
  REGION 1..120: note = Description of Artificial Sequence: Synthetic polypeptide
QVQLVQSGAEVKKPGASVKVSCKASGFSIEDFYIHWVRQAPGQGLEWMGWIDPEQGDSKYAPKFQGRATITADTSTSTAYMELSSLRSEDTAVYYCHADHGNYGSTMDYWGQGTLVTVSS

SEQ ID NO: 2727 - protein, 17 aa, synthetic construct
  REGION 1..17: note = Description of Artificial Sequence: Synthetic peptide
WIDPEQGDSKYAPKFQG

SEQ ID NO: 2728 - protein, 120 aa, synthetic construct
  REGION 1..120: note = Description of Artificial Sequence: Synthetic polypeptide
QVQLVQSGAEVKKPGASVKVSCKASGFSIEDFYIHWVRQAPGQGLEWMGWIDPENGESKYAPKFQGRATITADTSTSTAYMELSSLRSEDTAVYYCHADHGNYGSTMDYWGQGTLVTVSS

SEQ ID NO: 2729 - protein, 17 aa, synthetic construct
  REGION 1..17: note = Description of Artificial Sequence: Synthetic peptide
WIDPENGESKYAPKFQG

SEQ ID NO: 2730 - protein, 120 aa, synthetic construct
  REGION 1..120: note = Description of Artificial Sequence: Synthetic polypeptide
QVQLVQSGAEVKKPGASVKVSCKASGFSIEDFYIHWVRQAPGQGLEWMGWIDPEQGESKYAPKFQGRATITADTSTSTAYMELSSLRSEDTAVYYCHADHGNYGSTMDYWGQGTLVTVSS

SEQ ID NO: 2731 - protein, 17 aa, synthetic construct
  REGION 1..17: note = Description of Artificial Sequence: Synthetic peptide
WIDPEQGESKYAPKFQG

SEQ ID NO: 2732 - protein, 120 aa, synthetic construct
  REGION 1..120: note = Description of Artificial Sequence: Synthetic polypeptide
QVQLVQSGAEVKKPGASVKVSCKASGFSIEDFYIHWVRQAPGQGLEWMGWIDPEQGDSKYAPKFQGRVTITADTSTSTAYMELSSLRSEDTAVYYCHADHGNYGSTMDYWGQGTLVTVSS

SEQ ID NO: 2733 - protein, 120 aa, synthetic construct
  REGION 1..120: note = Description of Artificial Sequence: Synthetic polypeptide
QVQLVQSGAEVKKPGASVKVSCKASGFSIEDFYIHWVRQAPGQGLEWMGWIDPENGESKYAPKFQGRVTITADTSTSTAYMELSSLRSEDTAVYYCHADHGNYGSTMDYWGQGTLVTVSS

SEQ ID NO: 2734 - protein, 120 aa, synthetic construct
  REGION 1..120: note = Description of Artificial Sequence: Synthetic polypeptide
QVQLVQSGAEVKKPGASVKVSCKASGFSIEDFYIHWVRQAPGQGLEWMGWIDPEQGESKYAPKFQGRVTITADTSTSTAYMELSSLRSEDTAVYYCHADHGNYGSTMDYWGQGTLVTVSS

SEQ ID NO: 2735 - protein, 17 aa, synthetic construct
  REGION 1..17: note = Description of Artificial Sequence: Synthetic peptide
  MOD_RES 6: note = Asn or Gln
  MOD_RES 8: note = Asp or Glu
WIDPEXGXSKYAPKFQG

SEQ ID NO: 2736 - protein, 10 aa, synthetic construct
  REGION 1..10: note = Description of Artificial Sequence: Synthetic peptide
  MOD_RES 6: note = Asp or Asn
GFTFTXFYMS

SEQ ID NO: 2737 - protein, 19 aa, synthetic construct
  REGION 1..19: note = Description of Artificial Sequence: Synthetic peptide
  MOD_RES 5: note = Lys or Arg
  MOD_RES 6: note = Ala or Pro
  MOD_RES 8: note = Gly or Ala
  MOD_RES 11: note = Ala or Thr
  MOD_RES 12: note = Gly or Asp
VIRNXXNXYTXXYNPSVKG

SEQ ID NO: 2738 - protein, 9 aa, synthetic construct
  REGION 1..9: note = Description of Artificial Sequence: Synthetic peptide
  MOD_RES 1: note = Ala or Thr
  MOD_RES 4: note = Thr or Ser
XRLXYGFDY

SEQ ID NO: 2739 - protein, 16 aa, synthetic construct
  REGION 1..16: note = Description of Artificial Sequence: Synthetic peptide
  MOD_RES 10: note = Asn or Thr
QSSKSLLHSXGKTYLN

SEQ ID NO: 2740 - protein, 9 aa, synthetic construct
  REGION 1..9: note = Description of Artificial Sequence: Synthetic peptide
  MOD_RES 6: note = Tyr or Phe
QQFLEXPFT

SEQ ID NO: 2741 - protein, 112 aa, synthetic construct
  REGION 1..112: note = Description of Artificial Sequence: Synthetic polypeptide
DIVMTQSPDSLAVSLGERATINCQSSKSLLHSNGKTYLNWYQQKPGQPPKLLIYWMSTRASGVPDRFSGSGSGTDFTLTISSLQAEDVAVYYCQQFLEFPFTFGQGTKVEIK

SEQ ID NO: 2742 - protein, 7 aa, synthetic construct
  REGION 1..7: note = Description of Artificial Sequence: Synthetic peptide
FPGESES

SEQ ID NO: 2743 - protein, 9 aa, synthetic construct
  REGION 1..9: note = Description of Artificial Sequence: Synthetic peptide
GEKGPCQRV

SEQ ID NO: 2744 - protein, 12 aa, synthetic construct
  REGION 1..12: note = Description of Artificial Sequence: Synthetic peptide
TLRNLQPHDAGL

SEQ ID NO: 2745 - protein, 4 aa, synthetic construct
  REGION 1..4: note = Description of Artificial Sequence: Synthetic peptide
VEVL

SEQ ID NO: 2746 - protein, 107 aa, synthetic construct; identical to SEQ ID NO: 60
  REGION 1..107: note = Description of Artificial Sequence: Synthetic polypeptide

SEQ ID NO: 2747 - protein, 123 aa, synthetic construct; identical to SEQ ID NO: 123
  REGION 1..123: note = Description of Artificial Sequence: Synthetic polypeptide

SEQ ID NO: 2748 - protein, 107 aa, synthetic construct; identical to SEQ ID NO: 61
  REGION 1..107: note = Description of Artificial Sequence: Synthetic polypeptide

SEQ ID NO: 2749 - protein, 123 aa, synthetic construct; identical to SEQ ID NO: 124
  REGION 1..123: note = Description of Artificial Sequence: Synthetic polypeptide

SEQ ID NO: 2750 - protein, 112 aa, synthetic construct; identical to SEQ ID NO: 1819
  REGION 1..112: note = Description of Artificial Sequence: Synthetic polypeptide

SEQ ID NO: 2751 - protein, 123 aa, synthetic construct; identical to SEQ ID NO: 1766
  REGION 1..123: note = Description of Artificial Sequence: Synthetic polypeptide

SEQ ID NO: 2752 - protein, 118 aa, synthetic construct
  REGION 1..118: note = Description of Artificial Sequence: Synthetic polypeptide
EVQLVESGGGLVQPGGSLRLSCAGSGFTFTDFYMSWVRQAPGKGPEWLSVIRNKANGYTAGYNPSVKGRFTISRDNSKNTLYLQMNSLRAEDTAVYYCARLTYGFDYWGQGTLVTVSS

SEQ ID NO: 2753 - protein, 10 aa, synthetic construct
  REGION 1..10: note = Description of Artificial Sequence: Synthetic peptide
  REGION 1..10: note = Antibody 1 CDR-H1
GFSFNTYWIG

SEQ ID NO: 2754 - protein, 17 aa, synthetic construct
  REGION 1..17: note = Description of Artificial Sequence: Synthetic peptide
  REGION 1..17: note = Antibody 1 CDR-H2
IIYPGDQDIRYSPSFQG

SEQ ID NO: 2755 - protein, 18 aa, synthetic construct
  REGION 1..18: note = Description of Artificial Sequence: Synthetic peptide
  REGION 1..18: note = Antibody 1 CDR-H3
ARYGRYIYGYGGYHGMDV

SEQ ID NO: 2756 - protein, 11 aa, synthetic construct
  REGION 1..11: note = Description of Artificial Sequence: Synthetic peptide
  REGION 1..11: note = Antibody 1 CDR-L1
RASQAIRDDLG

SEQ ID NO: 2757 - protein, 8 aa, synthetic construct
  REGION 1..8: note = Description of Artificial Sequence: Synthetic peptide
  REGION 1..8: note = Antibody 1 CDR-L2
YAASSLQS

SEQ ID NO: 2758 - protein, 9 aa, synthetic construct
  REGION 1..9: note = Description of Artificial Sequence: Synthetic peptide
  REGION 1..9: note = Antibody 1 CDR-L3
LQNYNYPHT

SEQ ID NO: 2759 - protein, 125 aa, synthetic construct
  REGION 1..125: note = Description of Artificial Sequence: Synthetic polypeptide
  REGION 1..125: note = Antibody 1 VH
EVQLVQSGAEVKKPGESLKISCKGSGFSFNTYWIGWVRQMPGKGLEWMGIIYPGDQDIRYSPSFQGQVTISADKSISTAYLQWSSLKASDTAMYYCARYGRYIYGYGGYHGMDVWGQGTTVTVSS

SEQ ID NO: 2760 - protein, 107 aa, synthetic construct
  REGION 1..107: note = Description of Artificial Sequence: Synthetic polypeptide
  REGION 1..107: note = Antibody 1 VL
DIQMTQSPSSLSASVGDRVTITCRASQAIRDDLGWYQQKPGKAPKLLIYAASSLQSGVPSRFSGSGSGTDFTLTISSLQPEDFATYYCLQNYNYPHTFGQGTKLEIK

SEQ ID NO: 2761 - protein, 451 aa, synthetic construct
  REGION 1..451: note = Description of Artificial Sequence: Synthetic polypeptide
  REGION 1..451: note = Antibody 1 Heavy Chain
EVQLVQSGAEVKKPGESLKISCKGSGFSFNTYWIGWVRQMPGKGLEWMGIIYPGDQDIRYSPSFQGQVTISADKSISTAYLQWSSLKASDTAMYYCARYGRYIYGYGGYHGMDVWGQGTTVTVSSASTKGPSVFPLAPCSRSTSESTAALGCLVKDYFPEPVTVSWNSGALTSGVHTFPAVLQSSGLYSLSSVVTVPSSSLGTKTYTCNVDHKPSNTKVDKRVESKYGPPCPPCPAPEAAGGPSVFLFPPKPKDTLMISRTPEVTCVVVDVSQEDPEVQFNWYVDGVEVHNAKTKPREEQFNSTYRVVSVLTVLHQDWLNGKEYKCKVSNKGLPSSIEKTISKAKGQPREPQVYTLPPSQEEMTKNQVSLTCLVKGFYPSDIAVEWESNGQPENNYKTTPPVLDSDGSFFLYSRLTVDKSRWQEGNVFSCSVMHEALHNHYTQKSLSLSLG

SEQ ID NO: 2762 - protein, 214 aa, synthetic construct
  REGION 1..214: note = Description of Artificial Sequence: Synthetic polypeptide
  REGION 1..214: note = Antibody 1 Light Chain
DIQMTQSPSSLSASVGDRVTITCRASQAIRDDLGWYQQKPGKAPKLLIYAASSLQSGVPSRFSGSGSGTDFTLTISSLQPEDFATYYCLQNYNYPHTFGQGTKLEIKRTVAAPSVFIFPPSDEQLKSGTASVVCLLNNFYPREAKVQWKVDNALQSGNSQESVTEQDSKDSTYSLSSTLTLSKADYEKHKVYACEVTHQGLSSPVTKSFNRGEC

SEQ ID NO: 2763 - protein, 162 aa, synthetic construct
  REGION 1..162: note = Description of Artificial Sequence: Synthetic polypeptide
  REGION 1..162: note = Human TREM2 ECD-His
HNTTVFQGVAGQSLQVSCPYDSMKHWGRRKAWCRQLGEKGPCQRVVSTHNLWLLSFLRRWNGSTAITDDTLGGTLTITLRNLQPHDAGLYQCQSLHGSEADTLRKVLVEVLADPLDHRDAGDLWFPGESESFEDAHVEHSISRSLLEGEIPFPPTSHHHHHH

SEQ ID NO: 2764 - protein, 159 aa, synthetic construct
  REGION 1..159: note = Description of Artificial Sequence: Synthetic polypeptide
  REGION 1..159: note = Mouse TREM2 ECD-His
LNTTVLQGMAGQSLRVSCTYDALKHWGRRKAWCRQLGEEGPCQRVVSTHGVWLLAFLKKRNGSTVIADDTLAGTVTITLKNLQAGDAGLYQCQSLRGREAEVLQKVLVEVLEDPLDDQDAGDLWVPEESSSFEGAQVEHSTSRNQETSFPPTSHHHHHH

SEQ ID NO: 2765 - protein, 166 aa, synthetic construct
  REGION 1..166: note = Description of Artificial Sequence: Synthetic polypeptide
  REGION 1..166: note = Rat TREM2 ECD-His
NTTVFQGVAGQSLRVSCPYDSATHWGRRKAWCRQLGEEGPCERVVSTHSWWLLSFLKRRNGSTAITDDALGGTLTVTLRDLQAQDAGVYQCQSLQGREASTLQKILVEVLTEPLEHEHAGDFWVPEESGSFEDPPVERSSSRSPSEGEPSFPPASGGGGQHHHHHH

SEQ ID NO: 2766 - protein, 156 aa, synthetic construct
  REGION 1..156: note = Description of Artificial Sequence: Synthetic polypeptide
  REGION 1..156: note = Rabbit TREM2 ECD-His
NTTVLQGVAGQSLRVSCTYDALRHWGRRKAWCRQLAEEGPCQRVVSTHGVWLLAFLRKQNGSTVITDDTLAGTVTITLRNLQAGDAGLYQCQSLRGREAEVLQKVVVEVLEDPLDDQDAGDLWVPEESESFEGAQVEHSTSRSQSGGGGQHHHHHH

SEQ ID NO: 2767 - protein, 168 aa, synthetic construct
  REGION 1..168: note = Description of Artificial Sequence: Synthetic polypeptide
  REGION 1..168: note = Cynomolgus monkey TREM2 ECD-His
HNTTVFQGVEGQSLQVSCPYDSMKHWGRRKAWCRQLGEKGPCQRVVSTHNLWLLSFLRRRNGSTAITDDTLGGTLTITLRNLQPHDAGFYQCQSLHGSEADTLRKVLVEVLADPLDHRDAGDLWVPGESESFEDAHVEHSISRPSQGSHLPSCLSKEGGGGQHHHHHH

SEQ ID NO: 2768 - protein, 220 aa, synthetic construct
  REGION 1..220: note = Description of Artificial Sequence: Synthetic polypeptide
  REGION 1..220: note = 24G6-1 (SST28347-1) LC
DIVMTQSPDSLAVSLGERATINCKSSQSVLYSSNNKHFLAWYQQKPGQPPKLLIYWASTRESGVPDRFSGSGSGTDFTLTISSLQAEDVAVYYCQQYYSTPLTFGGGTKVEIKRTVAAPSVFIFPPSDEQLKSGTASVVCLLNNFYPREAKVQWKVDNALQSGNSQESVTEQDSKDSTYSLSSTLTLSKADYEKHKVYACEVTHQGLSSPVTKSFNRGEC

SEQ ID NO: 2769 - protein, 449 aa, synthetic construct
  REGION 1..449: note = Description of Artificial Sequence: Synthetic polypeptide
  REGION 1..449: note = 24G6-1 (SST28347-1) HC
EVQLLESGGGLVQPGGSLRLSCAASGFTFSSYAMSWVRQAPGKGLEWVSAISGSGGSTYYAESVKGRFTISRDNSKNTLYLQMNSLRAEDTAVYYCAKAYTPMAFFDYWGQGTLVTVSSASTKGPSVFPLAPSSKSTSGGTAALGCLVKDYFPEPVTVSWNSGALTSGVHTFPAVLQSSGLYSLSSVVTVPSSSLGTQTYICNVNHKPSNTKVDKKVEPKSCDKTHTCPPCPAPELLGGPSVFLFPPKPKDTLMISRTPEVTCVVVDVSHEDPEVKFNWYVDGVEVHNAKTKPCEEQYGSTYRCVSVLTVLHQDWLNGKEYKCKVSNKALPAPIEKTISKAKGQPREPQVYTLPPSREEMTKNQVSLTCLVKGFYPSDIAVEWESNGQPENNYKTTPPVLDSDGSFFLYSKLTVDKSRWQQGNVFSCSVMHEALHNHYTQKSLSLSPGK

SEQ ID NO: 2770 - protein, 445 aa, synthetic construct
  REGION 1..445: note = Description of Artificial Sequence: Synthetic polypeptide
  REGION 1..445: note = 24G6-1 (SST28347-1) HC
EVQLLESGGGLVQPGGSLRLSCAASGFTFSSYAMSWVRQAPGKGLEWVSAISGSGGSTYYAESVKGRFTISRDNSKNTLYLQMNSLRAEDTAVYYCAKAYTPMAFFDYWGQGTLVTVSSASTKGPSVFPLAPSSRSTSESTAALGCLVKDYFPEPVTVSWNSGALTSGVHTFPAVLQSSGLYSLSSVVTVPSSNFGTQTYTCNVDHKPSNTKVDKTVERKCCVECPPCPAPELLGGPSVFLFPPKPKDTLMISRTPEVTCVVVDVSHEDPEVKFNWYVDGVEVHNAKTKPCEEQYGSTYRCVSVLTVLHQDWLNGKEYKCKVSNKALPAPIEKTISKAKGQPREPQVYTLPPSREEMTKNQVSLTCLVKGFYPSDIAVEWESNGQPENNYKTTPPVLDSDGSFFLYSKLTVDKSRWQQGNVFSCSVMHEALHNHYTQKSLSLSPG

SEQ ID NO: 2771 - protein, 214 aa, synthetic construct
  REGION 1..214: note = Description of Artificial Sequence: Synthetic polypeptide
  REGION 1..214: note = 6E7-1 (SST29857-1) LC
DIQMTQSPSSVSASVGDRVTITCRASQGISSWLAWYQQKPGKAPKLLIYAASSLQSGVPSRFSGSGSGTDFTLTISSLQPEDFATYFCQQADAFPRTFGQGTKLEIKRTVAAPSVFIFPPSDEQLKSGTASVVCLLNNFYPREAKVQWKVDNALQSGNSQESVTEQDSKDSTYSLSSTLTLSKADYEKHKVYACEVTHQGLSSPVTKSFNRGEC

SEQ ID NO: 2772 - protein, 449 aa, synthetic construct
  REGION 1..449: note = Description of Artificial Sequence: Synthetic polypeptide
  REGION 1..449: note = 6E7-1 (SST29857-1) HC
EVQLVQSGAEVKKPGESLKISCKGSGYSFTSYWIAWVRQMPGKGLEWMGIIYPGDADARYSPSFQGQVTISADKSISTAYLQWSSLKASDTAMYFCARQRTFYYDSSDYFDYWGQGTLVTVSSASTKGPSVFPLAPSSRSTSESTAALGCLVKDYFPEPVTVSWNSGALTSGVHTFPAVLQSSGLYSLSSVVTVPSSNFGTQTYTCNVDHKPSNTKVDKTVERKCCVECPPCPAPELLGGPSVFLFPPKPKDTLMISRTPEVTCVVVDVSHEDPEVKFNWYVDGVEVHNAKTKPCEEQYGSTYRCVSVLTVLHQDWLNGKEYKCKVSNKALPAPIEKTISKAKGQPREPQVYTLPPSREEMTKNQVSLTCLVKGFYPSDIAVEWESNGQPENNYKTTPPVLDSDGSFFLYSKLTVDKSRWQQGNVFSCSVMHEALHNHYTQKSLSLSPG

SEQ ID NO: 2773 - protein, 214 aa, synthetic construct
  REGION 1..214: note = Description of Artificial Sequence: Synthetic polypeptide
  REGION 1..214: note = 13E7-1 (SST202443-1) LC
EIVMTQSPATLSVSPGERATLSCRASQSVSSNLAWFQQKPGQAPRLLIYGASTRATGIPARFSGSGSGTEFTLTISSLQPEDFAVYYCLQDNNFPPTFGQGTKVDIKRTVAAPSVFIFPPSDEQLKSGTASVVCLLNNFYPREAKVQWKVDNALQSGNSQESVTEQDSKDSTYSLSSTLTLSKADYEKHKVYACEVTHQGLSSPVTKSFNRGEC

SEQ ID NO: 2774 - protein, 450 aa, synthetic construct
  REGION 1..450: note = Description of Artificial Sequence: Synthetic polypeptide
  REGION 1..450: note = 13E7-1 (SST202443-1) HC
EVQLVQSGAEVKKPGESLKISCKGSGYSFTSYWIGWVRQMPGKGLEWMGIIYPGDADARYSPSFQGQVTISADKSISTAYLQWSSLKASDTAMYFCARRRQGIFGDALDFWGQGTLVTVSSASTKGPSVFPLAPSSKSTSGGTAALGCLVKDYFPEPVTVSWNSGALTSGVHTFPAVLQSSGLYSLSSVVTVPSSSLGTQTYICNVNHKPSNTKVDKKVEPKSCDKTHTCPPCPAPELLGGPSVFLFPPKPKDTLMISRTPEVTCVVVDVSHEDPEVKFNWYVDGVEVHNAKTKPCEEQYGSTYRCVSVLTVLHQDWLNGKEYKCKVSNKALPAPIEKTISKAKGQPREPQVYTLPPSREEMTKNQVSLTCLVKGFYPSDIAVEWESNGQPENNYKTTPPVLDSDGSFFLYSKLTVDKSRWQQGNVFSCSVMHEALHNHYTQKSLSLSPG

SEQ ID NO: 2775 - protein, 214 aa, synthetic construct
  REGION 1..214: note = Description of Artificial Sequence: Synthetic polypeptide
  REGION 1..214: note = 5E3-1 (SST29825-1) LC
DIQMTQSPSSLSASVGDRVTITCRASQGISNYLAWYQQKPGKAPKSLIYAASSLQSGVPSRFSGSGSGTDFTLTISSLQPEDFATYYCQQYSTYPFTFGQGTKVDIKRTVAAPSVFIFPPSDEQLKSGTASVVCLLNNFYPREAKVQWKVDNALQSGNSQESVTEQDSKDSTYSLSSTLTLSKADYEKHKVYACEVTHQGLSSPVTKSFNRGEC

SEQ ID NO: 2776 - protein, 447 aa, synthetic construct
  REGION 1..447: note = Description of Artificial Sequence: Synthetic polypeptide
  REGION 1..447: note = 5E3-1 (SST29825-1) HC
QVQLVQSGAEVKKPGASVKVSCKASGYTFTGYYIHWVRQAPGQGLEWMGWINPYSGGTTSAQKFQGRVTMTRDTSTSSAYMELSRLRSDDTAVYYCARDAGYLALYGTDVWGQGTLVTVSSASTKGPSVFPLAPSSRSTSESTAALGCLVKDYFPEPVTVSWNSGALTSGVHTFPAVLQSSGLYSLSSVVTVPSSNFGTQTYTCNVDHKPSNTKVDKTVERKCCVECPPCPAPELLGGPSVFLFPPKPKDTLMISRTPEVTCVVVDVSHEDPEVKFNWYVDGVEVHNAKTKPCEEQYGSTYRCVSVLTVLHQDWLNGKEYKCKVSNKALPAPIEKTISKAKGQPREPQVYTLPPSREEMTKNQVSLTCLVKGFYPSDIAVEWESNGQPENNYKTTPPVLDSDGSFFLYSKLTVDKSRWQQGNVFSCSVMHEALHNHYTQKSLSLSPG

SEQ ID NO: 2777 - protein, 214 aa, synthetic construct; identical to SEQ ID NO: 2773
  REGION 1..214: note = Description of Artificial Sequence: Synthetic polypeptide
  REGION 1..214: note = 13E7 Variant LC

SEQ ID NO: 2778 - protein, 451 aa, synthetic construct
  REGION 1..451: note = Description of Artificial Sequence: Synthetic polypeptide
  REGION 1..451: note = 13E7 Variant HC
EVQLVQSGAEVKKPGESLKISCKGSGYSFTSYWIGWVRQMPGKGLEWMGIIYPGDADARYSPSFQGQVTISADKSISTAYLQWSSLKASDTAMYFCARRRQGIFGDALDFWGQGTLVTVSSASTKGPSVFPLAPSSKSTSGGTAALGCLVKDYFPEPVTVSWNSGALTSGVHTFPAVLQSSGLYSLSSVVTVPSSSLGTQTYICNVNHKPSNTKVDKKVEPKSCDKTHTCPPCPAPELLGGPSVFLFPPKPKDTLMISRTPEVTCVVVDVSHEDPEVKFNWYVDGVEVHNAKTKPCEEQYGSTYRCVSVLTVLHQDWLNGKEYKCKVSNKALPAPIEKTISKAKGQPREPQVYTLPPSREEMTKNQVSLTCLVKGFYPSDIAVEWESNGQPENNYKTTPPVLDSDGSFFLYSKLTVDKSRWQQGNVFSCSVMHEALHNHYTQKSLSLSPGK

SEQ ID NO: 2779 - protein, 445 aa, synthetic construct
  REGION 1..445: note = Description of Artificial Sequence: Synthetic polypeptide
  REGION 1..445: note = Murinized Ab-3 HC
EVQLVQSGAEVKKPGESLKISCKGSGYSFTSYWIGWVRQMPGKGLEWMGIIYPGDADARYSPSFQGQVTISADKSISTAYLQWSSLKASDTAMYFCARRRQGIFGDALDFWGQGTLVTVSSAKTTPPSVYPLAPGSAAQTNSMVTLGCLVKGYFPEPVTVTWNSGSLSSGVHTFPAVLQSDLYTLSSSVTVPSSTWPSETVTCNVAHPASSTKVDKKIVPRDCGCKPCICTVPEVSSVFIFPPKPKDVLTITLTPKVTCVVVDISKDDPEVQFSWFVDDVEVHTAQTQPREEQFGSTFRSVSELPIMHQDWLNGKEFKCRVNSAAFPAPIEKTISKTKGRPKAPQVYTIPPPKEQMAKDKVSLTCMITDFFPEDITVEWQWNGQPAENYKNTQPIMDTDGSYFVYSKLNVQKSNWEAGNTFTCSVLHEGLHNHHTEKSLSHSPGK

SEQ ID NO: 2780 - protein, 214 aa, synthetic construct
  REGION 1..214: note = Description of Artificial Sequence: Synthetic polypeptide
  REGION 1..214: note = Murinized Ab-3 LC
EIVMTQSPATLSVSPGERATLSCRASQSVSSNLAWFQQKPGQAPRLLIYGASTRATGIPARFSGSGSGTEFTLTISSLQPEDFAVYYCLQDNNFPPTFGQGTKVDIKRADAAPTVSIFPPSSEQLTSGGASVVCFLNNFYPKDINVKWKIDGSERQNGVLNSWTDQDSKDSTYSMSSTLTLTKDEYERHNSYTCEATHKTSTSPIVKSFNRNEC

1. A method of treating a disease or disorder caused by and/or associated with colony-stimulating factor 1 receptor (CSF1R) dysfunction in a human patient, the method comprising administering to the patient an effective amount of an agonist of triggering receptor expressed on myeloid cells 2 (TREM2).

2. The method of claim 1, wherein the disease or disorder is selected from adult-onset leukoencephalopathy with axonal spheroids and pigmented glia (ALSP), hereditary diffuse leukoencephalopathy with axonal spheroids (HDLS), pigmentary orthochromatic leukodystrophy (POLD), pediatric-onset leukoencephalopathy, congenital absence of microglia, or brain abnormalities neurodegeneration and dysosteosclerosis (BANDDOS).

3. The method of claim 1, wherein the disease or disorder is selected from Nasu-Hakola disease, Alzheimer's disease, frontotemporal dementia, multiple sclerosis, Guillain-Barre syndrome, amyotrophic lateral sclerosis (ALS), Parkinson's disease, traumatic brain injury, spinal cord injury, systemic lupus erythematosus, rheumatoid arthritis, prion disease, stroke, osteoporosis, osteopetrosis, osteosclerosis, skeletal dysplasia, dysosteoplasia, Pyle disease, cerebral autosomal dominant arteriopathy with subcortical infarcts and leukoencephalopathy, cerebral autosomal recessive arteriopathy with subcortical infarcts and leukoencephalopathy, cerebroretinal vasculopathy, or metachromatic leukodystrophy; wherein the patient exhibits CSF1R dysfunction, and/or has a mutation in a gene affecting the function of CSF1R.

4. The method of claim 1, wherein the disease or disorder is ALSP.

5. The method of claim 1, wherein the patient possesses a heterozygous loss of function mutation in the kinase domain of the CSF1R.

6. The method of claim 1, wherein the administration of the agonist of TREM2 increases microglia function in the patient.

7. The method of claim 1, wherein the agonist of TREM2 activates TREM2/DAP12 signaling in myeloid cells.

8. The method of claim 1, wherein the agonist of TREM2 activates, induces, promotes, stimulates, or otherwise increases one or more TREM2 activities selected from:
(a) TREM2 binding to DAP12; DAP12 binding to TREM2; TREM2 phosphorylation; DAP12 phosphorylation;
(b) PBK activation;
(c) increased levels of soluble TREM2 (sTREM2);
(d) increased levels of soluble CSF IR (sCSF1R);
(e) increased expression of one or more anti-inflammatory mediators selected from the group consisting of IL-12p70, IL-6, and IL-10;
(f) reduced expression of one or more pro-inflammatory mediators selected from the group consisting of IFN-α4, IFN-b, IL-6, IL-12 p70, IL-1β, TNF, TNF-α, IL-10, IL-8, CRP, TGF-beta members of the chemokine protein families, IL-20 family members, IL-33, LIF, IFN-gamma, OSM, CNTF, TGF-beta, GM-CSF, IL-11, IL-12, IL-17, IL-18, and CRP;
(g) increased expression of one or more chemokines selected from the group consisting of CCL2, CCL4, CXCLI0, CCL3 and CST7;
(h) reduced expression of TNF-α, IL-6, or both; extracellular signal-regulated kinase (ERK) phosphorylation; increased expression of C-C chemokine receptor 7 (CCR7);
(i) induction of microglial cell chemotaxis toward CCL19 and CCL21 expressing cells;
(j) an increase, normalization, or both of the ability of bone marrow-derived dendritic cells to induce antigen-specific T-cell proliferation; induction of osteoclast production;
(k) increased rate of osteoclastogenesis, or both; increasing the survival and/or function of one or more of dendritic cells, macrophages, microglial cells, M1 macrophages and/or microglial cells, activated M1 macrophages and/or microglial cells, M2 macrophages and/or microglial cells, monocytes, osteoclasts, Langerhans cells of skin, and Kupffer cells;
(l) induction of one or more types of clearance selected from the group consisting of apoptotic neuron clearance, nerve tissue debris clearance, non-nerve tissue debris clearance, bacteria or other foreign body clearance, disease-causing protein clearance, disease-causing peptide clearance, and disease-causing nucleic acid clearance;
(m) induction of phagocytosis of one or more of apoptotic neurons, nerve tissue debris, non-nerve tissue debris, bacteria, other foreign bodies, disease-causing proteins, disease-causing peptides, or disease-causing nucleic acids; normalization of disrupted TREM2/DAP12-dependent gene expression;
(n) recruitment of Syk, ZAP70, or both to the TREM2/DAP12 complex; Syk phosphorylation; increased expression of CD83 and/or CD86 on dendritic cells, macrophages, monocytes, and/or microglia;
(o) reduced secretion of one or more inflammatory cytokines selected from the group consisting of TNF-α, IL-10, IL-6, MCP-1, IFN-a4, IFN-b, IL-1β, IL-8, CRP, TGF-beta members of the chemokine protein families, IL-20 family members, IL-33, LIF, IFN-gamma, OSM, CNTF, TGF-beta, GM-CSF, IL-11, IL-12, IL-17, IL-18, and CRP;
(p) reduced expression of one or more inflammatory receptors; increasing phagocytosis by macrophages, dendritic cells, monocytes, and/or microglia under conditions of reduced levels of MCSF;
(q) decreasing phagocytosis by macrophages, dendritic cells, monocytes, and/or microglia in the presence of normal levels of MCSF; increasing activity of one or more TREM2-dependent genes;
(r) increased expression of one or more of 1L-4, CCL8, FasL, CSF1, CSF2, FIZZ1, CD206, Arg1, Ym1, IGF-1, Chi313, Fzd1, and IL-34;
(s) decreased expression of one or more of IL-12p40, IL-27, CSF3, CCR5, ABCD1 and CH25H; or
(t) any combination thereof.

9. The method of claim 1, wherein the agonist of TREM2 is an antigen binding protein or an antibody, or an antigen-binding fragment thereof.

10. The method of claim 9, wherein the agonist of TREM2 is a monoclonal antibody, a humanized antibody, or a human antibody.

11-12. (canceled)

13. The method of claim 1, wherein the agonist of TREM2 is an antibody or antigen-binding fragment thereof that specifically binds to the polypeptide of SEQ ID NO: 1.

14. The method of claim 13, wherein the antibody or antigen-binding fragment thereof binds specifically to a polypeptide of amino acid residues 19-174 of SEQ ID NO: 1 or to a polypeptide of amino acid residues 19-140 of SEQ ID NO: 1.

15. (canceled)

16. The method of claim 1, wherein the agonist of TREM2 is an antibody or antigen-binding fragment thereof comprising a light chain variable region having a CDRL1, CDRL2, and CDRL3 selected from Table 1A and 3E, and a heavy chain variable region having a CDRH1, CDRH2, and CDRH3 selected from Table 1B and 3E.

17. (canceled)

18. The method of claim 16, wherein the TREM2 agonist is an antibody or antigen-binding fragment thereof comprising:
(a) a CDRL1, CDRL2, and CDRL3 comprising the sequence of SEQ ID NOs: 8, 22, and 35, respectively, and a CDRH1, CDRH2, and CDRH3 comprising the sequence of SEQ ID NOs: 77, 368, and 98, respectively;
(b) a CDRL1, CDRL2, and CDRL3 comprising the sequence of SEQ ID NOs: 16, 369, and 370, respectively, and a CDRH1, CDRH2, and CDRH3 comprising the sequence of SEQ ID NOs: 85, 371, and 107, respectively;
(c) a CDRL1, CDRL2, and CDRL3 comprising the sequence of SEQ ID NOs: 10, 23, and 372, respectively, and a CDRH1, CDRH2, and CDRH3 comprising the sequence of SEQ ID NOs: 81, 373, and 374, respectively; or
(d) a CDRL1, CDRL2, and CDRL3 comprising the sequence of SEQ ID NOs: 17, 29, and 44, respectively, and a CDRH1, CDRH2, and CDRH3 comprising the sequence of SEQ ID NOs: 86, 94, and 375, respectively.

19. The method of claim 1, wherein the agonist of TREM2 is an antibody or antigen-binding fragment thereof comprising a light chain variable region selected from Table 1A or 3E, and a heavy chain variable region selected from Table 1B and 3E.

20. (canceled)

21. The method of claim 19, wherein the antibody or antigen-binding fragment thereof comprises
(a) a light chain variable region comprising the amino acid sequence of SEQ ID NO: 326 and a heavy chain variable region comprising the amino acid sequence of SEQ ID NO: 327;
(b) a light chain variable region comprising the amino acid sequence of SEQ ID NO: 328 and a heavy chain variable region comprising the amino acid sequence of SEQ ID NO: 329;
(c) a light chain variable region comprising the amino acid sequence of SEQ ID NO: 330 and a heavy chain variable region comprising the amino acid sequence of SEQ ID NO: 331; or
(d) a light chain variable region comprising the amino acid sequence of SEQ ID NO: 332 and a heavy chain variable region comprising the amino acid sequence of SEQ ID NO: 333.

22. The method of claim 1, wherein the agonist of TREM2 is a small molecule agonist of TREM2.

23. The method of claim 22, wherein the agonist of TREM2 is a lipid ligand of TREM2.

24. The method of claim 23, wherein the agonist of TREM2 is selected from 1-palmitoyl-2-(5′-oxo-valeroyl)-sn-glycero-3-phosphocholine (POVPC), 2-Arachidonoylglycerol (2-AG), 7-ketocholesterol (7-KC), 24(S)hydroxycholesterol (240HC), 25(S)hydroxycholesterol (250HC), 27-hydroxycholesterol (270HC), Acyl Cami tine (AC), alkylacylglycerophosphocholine (P AF), a-galactosylceramide (KRN7000), Bis(monoacylglycero)phosphate (BMP), Cardiolipin (CL), Ceramide, Ceramide-1-phosphate (CIP), Cholesteryl ester (CE), Cholesterol phosphate (CP), Diacylglycerol 34: 1 (DG 34: 1), Diacylglycerol 38:4 (DG 38:4), Diacylglycerol pyrophosphate (DGPP), Dihyrdoceramide (DhCer), Dihydrosphingomyelin (DhSM), Ether phosphatidylcholine (PCe), Free cholesterol (FC), Galactosylceramide (GalCer), Galactosylsphingosine (GalSo), Ganglioside GM1, Ganglioside GM3, Glucosylsphingosine (GlcSo), Hank's Balanced Salt Solution (HBSS), Kdo2-Lipid A (KLA), Lactosylceramide (LacCer), lysoalkylacylglycerophosphocholine (LPAF), Lysophosphatidic acid (LPA), Lysophosphatidylcholine (LPC), Lysophosphatidylethanolamine (LPE), Lysophosphatidylglycerol (LPG), Lysophosphatidylinositol (LPI), Lysosphingomyelin (LSM), Lysophosphatidylserine (LPS), N-Acyl-phosphatidylethanolamine (NAPE), N-Acyl-Serine (NSer), Oxidized phosphatidylcholine (oxPC), Palmitic-acid-9-hydroxy-stearic-acid (P AHSA), Phosphatidylethanolamine (PE), Phosphatidylethanol (PEtOH), Phosphatidic acid (PA), Phosphatidylcholine (PC), Phosphatidylglycerol (PG), Phosphatidylinositol (PI), Phosphatidylserine (PS), Sphinganine, Sphinganine-1-phosphate (SalP), Sphingomyelin (SM), Sphingosine, Sphingosine-1-phosphate (SolP), or Sulfatide, or a salt thereof.

25. (canceled)

26. The method of claim 22, wherein the agonist of TREM2 is selected from Tyrphostin AG 538, AC1NS458, IN1040, Butein, Okanin, AGL 2263, GB 19, GB16, GB20, GBl 7, GB 18, GB21, GB22, GB27, GB44, GB42, GB2, 4,4′-Dihydroxychalcone, or 3,4-Dihydroxybenzophenone, or a salt thereof.

27-28. (canceled)
